(19) United States
(12) Patent Application Publication
(10) Pub. No.: US 2020/0113927 A1
(43) Pub. Date: Apr. 16, 2020

(54) LACTATE DEHYDROGENASE A (LDHA) iRNA COMPOSITIONS AND METHODS OF USE THEREOF

(71) Applicants: Alnylam Pharmaceuticals, Inc., Cambridge, MA (US); The UAB Research Foundation, Birmingham, AL (US)

(72) Inventors: David Erbe, Arlington, MA (US); Abigail Liebow, Somerville, MA (US); Kevin Fitzgerald, Brookline, MA (US); Gregory Hinkle, Plymouth, MA (US); Kyle David Wood, Homewood, AL (US); Ross Philip Holmes, Birmingham, AL (US); John Knight, Homewood, AL (US)

(21) Appl. No.: 16/716,705

(22) Filed: Dec. 17, 2019

Related U.S. Application Data
(63) Continuation of application No. PCT/US2018/041977, filed on Jul. 13, 2018.
(60) Provisional application No. 62/576,783, filed on Oct. 25, 2017.
(60) Provisional application No. 62/532,020, filed on Jul. 13, 2017.

(51) Int. Cl. A61K 31/7105; C12N 15/113

(52) U.S. Cl. CPC A61K 31/7105; C12N 15/113; C12Y 101/01027; C12N 2310/3525; C12N 2310/3231; C12N 2310/11; C12N 2310/3521; C12N 2310/3523; C12N 2310/313; C12N 2310/3125; C12N 2310/321

(57) ABSTRACT

The invention relates to double-stranded ribonucleic acid (dsRNA) compositions targeting the LDHA gene, as well as methods of inhibiting epression of LDHA, methods of inhibiting LDHA and HAO1, and methods of treating subjects that would benefit from reduction in expression of LDHA, such as subjects having an oxalate pathway-associated disease, disorder, or condition, using such dsRNA compositions.

### RELATED APPLICATIONS

[0001] The present application is a 35 § U.S.C. 111(a) continuation application which claims the benefit of priority to PCT/US2018/041977, filed on Jul. 13, 2018, U.S. Provisional Application No. 62/576,783, filed on Oct. 25, 2017 and U.S. Provisional Application No. 62/532,020, filed on Jul. 13, 2017. The entire contents of each of the foregoing applications are incorporated herein by reference.

### SEQUENCE LISTING

[0002] The instant application contains a Sequence Listing which has been submitted electronically in ASCII format and is hereby incorporated by reference in its entirety. Said ASCII copy, created on Dec. 17, 2019, is named 121301-07503_SL.TXT and is 1,154,854 bytes in size.

### BACKGROUND OF THE INVENTION

[0003] Oxalate (C₂O₄²⁻) is the salt-forming ion of oxalic acid (C₂H₂O₄) that is widely distributed in both plants and animals. It is an unavoidable component of the human diet and a ubiquitous component of plants and plant-derived foods. Oxalate can also be synthesized endogenously via the metabolic pathways that occur in the liver. Dietary and endogenous contributions to urinary oxalate excretion are equal. Glyoxylate is an immediate precursor to oxalate and is derived from the oxidation of glycolate by the enzyme glycolate oxidase (GO), also known, and referred to herein, as hydroxyacid oxidase (HAO1), or by catabolism of hydroxyproline, a component of collagen. Transamination of glyoxylate with alanine by the enzyme alanine/glyoxylate aminotransferase (AGT) results in the formation of pyruvate and glycine. Excess glyoxylate is converted to oxalate by lactate dehydrogenase A (referred to herein as LDHA). The endogenous pathway for oxalate metabolism is illustrated in FIG. 1A.

[0004] Lactate dehydrogenase is a protein found in all tissues. It is composed of four subunits with the two most common subunits being the LDH-M and LDH-H proteins. These proteins are encoded by the LDHA and LDHB genes, respectively. Various combinations of the LDH-M and LDH-H proteins result in five distinct isoforms of LDH. LDHA is the most important gene involved in the liver lactate dehydrogenase isoform. Specifically, within the liver, LDHA is important as the final step in the endogenous production of oxalate, by converting the precursor glyoxylate to oxalate. It also serves an important role in the Cori Cycle and in the anaerobic phase of glycolysis where it converts lactate to pyruvate and vice versa.

[0005] Oxalic acid may form oxalate salts with various cations, such as sodium, potassium, magnesium, and calcium. Although sodium oxalate, potassium oxalate, and magnesium oxalate are water soluble, calcium oxalate (CaOx) is nearly insoluble. Excretion of oxalate occurs primarily by the kidneys via glomerular filtration and tubular secretion.

[0006] Since oxalate binds with calcium in the kidney, urinary CaOx supersaturation may occur, resulting in the formation and deposition of CaOx crystals in renal tissue or collecting system. These CaOx crystals contribute to the formation of diffuse renal calcifications (nephrocalcinosis) and stones (nephrolithiasis). Subjects having diffuse renal calcifications or nonobstructing stones typically have no symptoms. However, obstructing stones can cause severe pain. Moreover, over time, these CaOx crystals cause injury and progressive inflammation to the kidney and, when secondary complications such as obstruction are present, these CaOx crystals may lead to decreased renal function and in severe cases even to end-stage renal failure and the need for dialysis. Furthermore, systemic deposition of CaOx (systemic oxalosis) may occur in extrarenal tissues, including soft tissues (such as thyroid and breast), heart, nerves, joints, skin, and retina, which can lead to early death if left untreated.

[0007] Among the most well-known oxalate pathway-associated diseases, e.g., kidney stone formation diseases, are the primary hyperoxalurias which are inherited diseases characterized by increased endogenous oxalate synthesis with variable clinical phenotypes. Therapies that modulate oxalate synthesis are currently not available and there are only a few treatment options that exist for subjects having a hereditary hyperoxaluria. Ultimatly, some subjects with hereditary hyperoxaluria require kidney/liver transplants. Other oxalate pathway-associated diseases, disorders, and conditions include calcium oxalate tissue deposition diseases, disorders, and conditions.

[0008] Currently, the primary treatment for many of these oxalate pathway-associated diseases, disorders, and conditions (e.g., with kidney stone disease) is increased fluid intake and dietary alterations (e.g., decreased protein intake, decreased sodium intake, decreased ascorbic acid intake, moderate calcium intake, phosphate or magnesium supplementation, and pyridoxine treatment). However, subjects often fail to adhere to such life-style changes or experience no significant benefit. Treatment for some of the other oxalate pathway-associated diseases, disorders, and conditions, such as chronic kidney disease, include the use of ACE inhibitors (angiotensin converting enzyme inhibitors) and ARBs (angiotensin II antagonists) which may slow the progression of disease. Nonetheless, subjects having chronic kidney disease progressively lose kidney function and progress to the need for dialysis or a kidney transplant. Most of these oxalate pathway-associated diseases are without treatments, and none currently have oxalate reduction treatments available.

[0009] Further, there are oxalate pathway-associated diseases, disorders, and conditions include lactate dehydrogenase-associated diseases, disorders, and conditions. For example, the role of lactate dehydrogenase is well known in cancer (hepatocellular), and inhibition has been shown to reduce cancer growth. Other lactate dehydrogenase-associated diseases, disorders and conditions include fatty liver (steatosis), nonalcoholic steatohepatitis (NASH), cirrhosis of the liver, accumulation of fat in the liver, inflammation of the liver, hepatocellular necrosis, liver fibrosis, and nonalcoholic fatty liver disease (NAFLD). Given the essential role of LDH in glycolysis, however, treatment options have been limited.

[0010] Accordingly, there is a need in the art for alternative treatments for subjects having an oxalate pathway-associated disease, disorder, and condition.

### SUMMARY OF THE INVENTION

[0011] The present invention is based, at least in part, on the discovery that, by targeting LDHA with the iRNA agents, compositions comprising such agents, and methods disclosed herein, a liver specific and superior LDHA and urinary oxalate lowering effect is achieved.

[0012] Accordingly, the present invention provides iRNA compositions which effect the RNA-induced silencing complex (RISC)-mediated cleavage of RNA transcripts of an LDHA gene. The LDHA gene may be within a cell, e.g., a cell within a subject, such as a human. The present invention also provides methods of using the iRNA compositions of the invention for inhibiting the expression of an LDHA gene for treating a subject who would benefit from inhibiting or reducing the expression of an LDHA gene, e.g., a subject that would benefit from a reduction or inhibition in urinary oxalate production, e.g., a subject suffering or prone to suffering from an oxalate pathway-associated disease disorder, or condition, such as a subject suffering or prone to suffering from an oxalate-associated disease, disorder, or condition, e.g., a kidney stone formation disease, disorder, or condition or a calcium oxalate tissue deposition disease, disorder, or condition; or an LDHA-associated disease, disorder, or condition.

[0013] The present invention also provides iRNA compositions which effect the RNA-induced silencing complex (RISC)-mediated cleavage of RNA transcripts of an LDHA gene and an HAO1 gene. The LDHA gene and the HAO1 gene may be within a cell, e.g., a cell within a subject, such as a human. The present invention also provides methods of using the iRNA compositions of the invention for inhibiting the expression of an LDHA gene and an HAO1 gene for treating a subject who would benefit from inhibiting or reducing the expression of an LDHA gene and an HAO1 gene, e.g., a subject that would benefit from a reduction or inhibition in urinary oxalate production, e.g., a subject suffering or prone to suffering from an an oxalate-associated disease, disorder, or condition, e.g., a kidney stone formation disease, disorder, or condition or a calcium oxalate tissue deposition disease, disorder, or condition; or an LDH-associated disease, disorder, or condition.

[0014] Accordingly, in one aspect, the present invention provides a double stranded ribonucleic acid (dsRNA) agent for inhibiting expression of lactic acid dehydrogenase A (LDHA) in a cell, wherein said dsRNA agent comprises a sense strand and an antisense strand, the antisense strand comprising a region of complementarity which comprises at least 15 contiguous nucleotides differing by no more than 3 nucleotides from any one of the antisense sequences listed in any one of Tables 2-5.

[0015] In one embodiment, the dsRNA agent comprises at least one modified nucleotide.

[0016] In other embodiments, substantially all of the nucleotides of the sense strand comprise a modification; substantially all of the nucleotides of the antisense strand comprise a modification; or substantially all of the nucleotides of the sense strand and substantially all of the nucleotides of the antisense strand comprise a modification.

[0017] In yet other embodiments, all of the nucleotides of the sense strand comprise a modification; all of the nucleotides of the antisense strand comprise a modification; or all of the nucleotides of the sense strand and all of the nucleotides of the antisense strand comprise a modification.

[0018] In one embodiment, at least one of said modified nucleotides is selected from the group consisting of a deoxy-nucleotide, a 3′-terminal deoxy-thymine (dT) nucleotide, a 2′-O-methyl modified nucleotide, a 2′-fluoro modified nucleotide, a 2′-deoxy-modified nucleotide, a locked nucleotide, an unlocked nucleotide, a conformationally restricted nucleotide, a constrained ethyl nucleotide, an abasic nucleotide, a 2′-amino-modified nucleotide, a 2′-O-allyl-modified nucleotide, 2′-C-alkyl-modified nucleotide, 2′-hydroxly-modified nucleotide, a 2′-methoxyethyl modified nucleotide, a 2′-O-alkyl-modified nucleotide, a morpholino nucleotide, a phosphoramidate, a non-natural base comprising nucleotide, a tetrahydropyran modified nucleotide, a 1,5-anhydrohexitol modified nucleotide, a cyclohexenyl modified nucleotide, a nucleotide comprising a phosphorothioate group, a nucleotide comprising a methylphosphonate group, a nucleotide comprising a 5′-phosphate, a nucleotide comprising a 5′-phosphate mimic, a glycol modifice nucleotide, and a 2-O—(N-methylacetamide) modified nucleotide, and combinations thereof.

[0019] The region of complementarity may be at least 17 nucleotides in length; 19 to 30 nucleotides in length; 19-25 nucleotides in length; or 21 to 23 nucleotides in length.

[0020] Each strand of the dsRNA agent may be no more than 30 nucleotides in length. Each strand of the dsRNA agent may be independently 19-30 nucleotides in length; independently 19-25 nucleotides in length; or independently 21-23 nucleotides in length.

[0021] At least one strand of the dsRNA agent may comprise a 3′ overhang of at least 1 nucleotide; or at least one strand may comprise a 3′ overhang of at least 2 nucleotides.

[0022] In one embodiment, the dsRNA agent further comprises at least one phosphorothioate or methylphosphonate internucleotide linkage.

[0023] The phosphorothioate or methylphosphonate internucleotide linkage may be at the 3′-terminus of one strand (e.g., the antisense strand; or the sense strand); or the phosphorothioate or methylphosphonate internucleotide linkage may be at the 5′-terminus of one strand (e.g., the antisense strand; or the sense strand); or the phosphorothioate or methylphosphonate internucleotide linkage may be at the both the 5′- and 3′-terminus of one strand.

[0024] The dsRNA agent may further comprise a ligand.

[0025] In one embodiment, the ligand is conjugated to the 3′ end of the sense strand of the dsRNA agent.

[0026] In one embodiment, the ligand is one or more N-acetylgalactosamine (GalNAc) derivatives attached through a monovalent, bivalent, or trivalent branched linker.

[0027] In another embodiment, the ligand is

[chemical structure]

[0028] In one embodiment, the dsRNA agent is conjugated to the ligand as shown in the following schematic

[chemical structure]

[0029] and, wherein X is O or S.

[0030] In one embodiment, the X is O.

[0031] In one embodiment, the region of complementarity consists of one of the antisense sequences listed in any one of Tables 2-5.

[0032] In one embodiment, the sense strand and the antisense strand comprise nucleotide sequences selected from the group consisting of the nucleotide sequences of any one of the agents listed Many one of Tables 2-5.

[0033] In another aspect, the present invention provides a dual targeting RNAi agent, comprising a first double stranded ribonucleic acid (dsRNA) agent that inhibits expression of lactic dehydrogenase A (LDHA) comprising a sense strand and an antisense strand; and a second double stranded ribonucleic acid (dsRNA) agent that inhibits expression of hydroxyacid oxidase 1 (glycolate oxidase) (HAO1) comprising a sense strand and an antisense strand, wherein the first dsRNA agent and the second dsRNA agent are covalently attached.

[0034] In one embodiment, the sense strand of the first dsRNA agent comprises at least 15 contiguous nucleotides differing by no more than 3 nucleotides from the nucleotide sequence of SEQ ID NO:1, and the antisense strand of the first dsRNA agent comprises at least 15 contiguous nucleotides differing by no more than 3 nucleotides from the nucleotide sequence of SEQ ID NO:2.

[0035] In another embodiment, the antisense strand of the first dsRNA agent comprises a region of complementarity which comprises at least 15 contiguous nucleotides differing by no more than 3 nucleotides from any one of the antisense sequences listed in any one of Tables 2-5.

[0036] In one embodiment, the sense strand of the second dsRNA agent comprises at least 15 contiguous nucleotides differing by no more than 3 nucleotides from the nucleotide sequence of SEQ ID NO:21, and said antisense strand of the second dsRNA agent comprises at least 15 contiguous nucleotides differing by no more than 3 nucleotides from the nucleotide sequence of SEQ ID NO:22.

[0037] In another embodiment, the antisense strand of the second dsRNA agent comprises a region of complementarity which comprises at least 15 contiguous nucleotides differing by no more than 3 nucleotides from any one of the antisense sequences listed in any one of Tables 7-14.

[0038] In one embodiment, the first dsRNA agent and the second dsRNA agent each independently comprise at least one modified nucleotide.

[0039] In another embodiment, substantially all of the nucleotides of the sense strand and substantially all of the nucleotides of the antisense strand of the first dsRNA agent and substantially all of the nucleotides of the sense strand and substantially all of the nucleotides of the antisense strand of the second dsRNA agent are modified nucleotides.

[0040] In one embodiment, at least one of the modified nucleotides of the first dsRNA agent and at least one of the modified nucleotides of the second dsRNA agent are each independently selected from the group consisting of a deoxy-nucleotide, a 3′-terminal deoxy-thymine (dT) nucleotide, a 2′-O-methyl modified nucleotide, a 2′-fluoro modified nucleotide, a 2′-deoxy-modified nucleotide, a locked nucleotide, an unlocked nucleotide, a conformationally restricted nucleotide, a constrained ethyl nucleotide, an abasic nucleotide, a 2′-amino-modified nucleotide, a 2′-O-allyl-modified nucleotide, 2′-C-alkyl-modified nucleotide, 2′-hydroxly-modified nucleotide, a 2′-methoxyethyl modified nucleotide, a 2′-O-alkyl-modified nucleotide, a morpholino nucleotide, a phosphoramidate, a non-natural base comprising nucleotide, a tetrahydropyran modified nucleotide, a 1,5-anhydrohexitol modified nucleotide, a cyclohexenyl modified nucleotide, a nucleotide comprising a phosphorothioate group, a nucleotide comprising a methylphosphonate group, a nucleotide comprising a 5′-phosphate, and a nucleotide comprising a 5′-phosphate mimic.

[0041] In another embodiment, at least one of the modified nucleotides of the first dsRNA agent and at least one of the modified nucleotides of the second dsRNA agent are each independently selected from the group consisting of 2′-O-methyl and 2′fluoro modifications.

[0042] The region of complementarity of the first dsRNA agent and/or the region of complementarity of the second dsRNA agent may each independently be 19 to 30 nucleotides in length.

[0043] Each strand of the first dsRNA agent and each strand of the second dsRNA agent may each independently be 19-30 nucleotides in length.

[0044] In one embodiment, at least one strand of the first dsRNA agent and/or at least one strand of the second dsRNA agent each independently comprise a 3′ overhang of at least 1 nucleotide. In one embodiment, the first dsRNA agent and/or the second dsRNA agent each independently further comprise at least one phosphorothioate or methylphosphonate internucleotide linkage.

[0045] In one embodiment, the first dsRNA agent and/or the second dsRNA agent each independently further comprise at least one ligand.

[0046] In another embodiment, the at least one ligand is conjugated to the sense strand of the first dsRNA agent and/or the second dsRNA agent.

[0047] In one embodiment, the at least one ligand is conjugated to the 3′-end, 5′-end, or an internal position of one of the sense strands.

[0048] In another embodiment, the at least one ligand is conjugated to the antisense strand of the first dsRNA agent and/or the second dsRNA agent.

[0049] In one embodiment, the at least one ligand is conjugated to the 3′-end, 5′-end, or an internal position of one of the antisense strands.

[0050] In one embodiment, the ligand is an N-acetylgalactosamine (GalNAc) derivative.

[0051] In one embodiment, the ligand is one or more GalNAc derivatives attached through a monovalent, a bivalent, or a trivalent branched linker.

[0052] In one embodiment, the ligand is

[chemical structure]

[0053] In one embodiment, the first dsRNA agent and the second dsRNA agent are each independently conjugated to the ligand as shown in the following schematic

[chemical structure]

and, wherein X is O or S.

[0054] In one embodiment, the X is O.

[0055] In one embodiment, the first dsRNA agent and the second dsRNA agent are covalently attached via a covalent linker.

[0056] In one embodiment, the covalent linker is selected from the group consisting of a single stranded nucleic acid linker, a double stranded nucleic acid linker, a partially single stranded nucleic acid linker, a partially double stranded nucleic acid linker, a carbohydrate moiety linker, and a peptide linker. In another embodiment, the covalent linker is a cleavable linker or a non-cleavable linker. In one embodiment, the covalent linker attaches the sense strand of the first dsRNA agent to the sense strand of the second dsRNA agent. In another embodiment, the covalent linker attaches the antisense strand of the first dsRNA agent to the antisense strand of the second dsRNA agent.

[0057] In one embodiment, the covalent linker further comprises at least one ligand.

[0058] In one embodiment, contacting a cell with the dual targeting RNAi agent of the inventioninhibits expression of the LDHA gene and the HAO1 gene to a level substantially the same as the level of inhibition of expression obtained by the contacting of a cell with both dsRNA agents individually. In another embodiment, contacting a cell with the dual targeting RNAi agent inhibits expression of the LDHA gene and the HAO1 gene to a level higher than the level of inhibition of expression obtained by the contacting of a cell with both dsRNA agents individually.

[0059] In one embodiment, the level of inhibition of LDHA expression is at least about 5%, about 10%, about 15%, about 20%, about 25%, about 30%, about 40%, about 50%, about 60%, about 70%, about 80%, about 90%, about 95%, about 98% or about 100% higher than the level of inhibition of expression obtained by the contacting of a cell with both dsRNA agents individually.

[0060] In one embodiment, the level of inhibition of HAO1 expression is at least about 5%, about 10%, about 15%, about 20%, about 25%, about 30%, about 40%, about 50%, about 60%, about 70%, about 80%, about 90%, about 95%, about 98% or about 100% higher than the level of inhibition of expression obtained by the contacting of a cell with both dsRNA agents individually.

[0061] In one embodiment, contacting a cell with the dual targeting RNAi agent inhibits oxalate and/or glyoxylate protein production to a level lower than the level of protein production obtained by the contacting of a cell with both dsRNA agents individually. In another embodiment, contacting a cell with the dual targeting RNAi agent inhibits oxalate and/or glyoxylate protein production to a level lower than the level of protein production obtained by the contacting of a cell with both dsRNA agents individually.

[0062] The present invention also provides cells containing a dsRNA agent or a dual targeting RNAi agent of the invention; and vectors encoding at least one strand of a dsRNA agent or a dual targeting RNAi agent of the invention.

[0063] Further, the present invention provides a pharmaceutical composition for inhibiting expression of a lactic acid dehydrogenase A (LDHA) gene comprising a dsRNA agent of the invention; or a pharmaceutical composition for inhibiting expression of a lactic acid dehydrogenase A (LDHA) gene and an hydroxyacid oxidase 1 (glycolate oxidase) (HAO1) gene comprising a dual targeting RNAi agent of the invention.

[0064] In one aspect, the present invention provides a pharmaceutical composition, comprising a first double stranded ribonucleic acid (dsRNA) agent that inhibits expression of lactic acid dehydrogenase A (LDHA) comprising a sense strand and an antisense strand, wherein said sense strand comprises at least 15 contiguous nucleotides differing by no more than 3 nucleotides from the nucleotide sequence of SEQ ID NO:1, and said antisense strand comprises at least 15 contiguous nucleotides differing by no more than 3 nucleotides from the nucleotide sequence of SEQ ID NO:2; and a second double stranded ribonucleic acid (dsRNA) agent that inhibits expression of hydroxyacid oxidase 1 (glycolate oxidase) (HAO1) comprising a sense strand and an antisense strand, wherein said sense strand comprises at least 15 contiguous nucleotides differing by no more than 3 nucleotides from the nucleotide sequence of SEQ ID NO:21, and said antisense strand comprises at least 15 contiguous nucleotides differing by no more than 3 nucleotides from the nucleotide sequence of SEQ ID NO:22.

[0065] In another aspect, the present invention provides a pharmaceutical composition, comprising a first double stranded ribonucleic acid (dsRNA) agent that inhibits expression of lactic acid dehydrogenase A (LDHA) comprising a sense strand and an antisense strand, the antisense strand comprising a region of complementarity which comprises at least 15 contiguous nucleotides differing by no more than 3 nucleotides from any one of the antisense sequences listed in any one of Tables 2-5; and a second double stranded ribonucleic acid (dsRNA) agent that inhibits expression of hydroxyacid oxidase 1 (glycolate oxidase) (HAO1) comprising a sense strand and an antisense strand, the antisense strand comprising a region of complementarity which comprises at least 15 contiguous nucleotides differing by no more than 3 nucleotides from any one of the antisense sequences listed in any one of Tables 7-14.

[0066] The agent may be formulated in an unbuffered solution, such as saline or water; or the agent may be formulated with a buffered solution, such as a solution comprising acetate, citrate, prolamine, carbonate, or phosphate or any combination thereof; or phosphate buffered saline (PBS).

[0067] The present invention provides a method of inhibiting lactic acid dehydrogenase A (LDHA) expression in a cell. The methods include contacting the cell with an agent or a pharmaceutical composition of the invention, thereby inhibiting expression of LDHA in the cell.

[0068] The present invention also provides a method of inhibiting lactic acid dehydrogenase A (LDHA) expression and hydroxyacid oxidase 1 (glycolate oxidase) (HAO1) expression in a cell. The method includes contacting the cell with a dual targeting RNAi agent of the invention or a pharmaceutical composition comprising a dual targeting agent of the invention, thereby inhibiting expression of LDHA and HAO1 in the cell.

[0069] In one embodiment, the cell is within a subject, such as a human.

[0070] In one embodiment, the LDHA expression is inhibited by at least 30%, 40%, 50%, 60%, 70%, 80%, 90%, 95%, or to below the level of detection of LDHA expression.

[0071] In one embodiment, the HAO1 expression is inhibited by at least 30%, 40%, 50%, 60%, 70%, 80%, 90%, 95%, or to below the level of detection of HAO1 expression.

[0072] In one embodiment, the human subject suffers from an oxalate pathway-associated disease, disorder, or condition.

[0073] In one embodiment, the oxalate pathway-associated disease, disorder, or condition is an oxalate-associated disease, disorder, or condition, or a lactate dehydrogenase-associated disease, disorder, or condition.

[0074] In one embodiment, the oxalate-associated disease, disorder, or condition is a kidney stone formation disease, disorder, or condition, or a calcium oxalate tissue deposition disease, disorder, or condition.

[0075] In one embodiment, the kidney stone formation disease, disorder, or condition is a calcium oxalate stone formation disease, disorder, or condition or a non-calcium oxalate stone formation disease, disorder, or condition.

[0076] In one embodiment, the calcium oxalate stone formation disease, disorder, or condition is a hyperoxaluria disease, disorder, or condition or a non-hyperoxaluria disease, disorder, or condition.

[0077] In one embodiment, the hyperoxaluria disease, disorder, or condition is selected from the group consisting of primary hyperoxaluria, enteric hyperoxaluria, dietary hyperoxaluria, and idiopathic hyperoxaluria.

[0078] In one embodiment, the non-hyperoxaluria stone formation disease, disorder, or condition is hypercalciuria and/or hypocitraturia.

[0079] In one embodiment, the non-hyperoxaluria stone formation disease, disorder, or condition is calcium oxalate or non-calcium oxalate kidney stone formation disease.

[0080] In one embodiment, the calcium oxalate tissue deposition disease, disorder, or condition is selected from the group consisting of systemic calcium oxalate tissue deposition disease, disorder, or condition or tissue specific calcium oxalate tissue deposition disease, disorder, or condition.

[0081] In one embodiment, the lactate dehydrogenase-associated disease, disorder, or condition is selected from the group consisting of cancer, fatty liver (steatosis), nonalcoholic steatohepatitis (NASH), cirrhosis of the liver, accumulation of fat in the liver, inflammation of the liver, hepatocellular necrosis, liver fibrosis, and nonalcoholic fatty liver disease (NAFLD).

[0082] In one embodiment, the cell is a liver cell.

[0083] In one aspect, the present invention provides a method of inhibiting the epression of LDHA in a subject. The method includes administering to the subject a therapeutically effective amount of the agent or a pharmaceutical composition of the invention, thereby inhibiting the expression of LDHA in the subject.

[0084] In another aspect, the present invention provides a method of inhibiting lactic acid dehydrogenase A (LDHA) expression and hydroxyacid oxidase 1 (glycolate oxidase) (HAO1) expression in a subject. The methods include administering to the subject a therapeutically effective amount of dual targeting RNAi agent of the invention, or a pharmaceutical composition comprising a dual targeting RNAi agent of the invention, thereby inhibiting expression of LDHA and HAO1 in the subject.

[0085] In one aspect, the present invention provides a method of treating a subject having a disorder that would benefit from a reduction in LDHA expression. The method includes administering to the subject a therapeutically effective amount of the agent or a pharmaceutical composition of the invention, thereby treating said subject.

[0086] In another aspect, the present invention provides a method of preventing at least one symptom in a subject having a disease or disorder that would benefit from reduction in expression of an LDHA gene. The methods include administering to the subject a prophylactically effective amount of an agent or a pharmaceutical composition of the invention, thereby preventing at least one symptom in the subject.

[0087] In one embodiment, the disorder is an oxalate pathway-associated disease, disorder, or condition.

[0088] In one aspect, the present invention provides a method of treating a subject having an oxalate pathway-associated disease, disorder, or condition. The method includes administering to the subject a therapeutically effective amount of an agent or a pharmaceutical composition of the invention, thereby treating the subject.

[0089] In another aspect, the present invention provides a method of preventing at least one symptom in a subject having an oxalate pathway-associated disease, disorder, or condition. The methods includes administering to the subject a prophylactically effective amount of the agent or a pharmaceutical composition of the invention, thereby preventing at least one symptom in the subject.

[0090] In one embodiment, the administration of the dsRNA agent or the pharmaceutical composition to the subject causes a decrease in one or urinary oxalate, tissue oxalate, plasma oxalate, a decrease in LDHA enzymatic activity, a decrease in LDHA protein accumulation, and/or a decrease in HAO1 protein accumulation.

[0091] In one embodiment, the oxalate pathway-associated disease, disorder, or condition is an oxalate-associated disease, disorder, or condition, or a lactate dehydrogenase-associated disease, disorder, or condition.

[0092] In one embodiment, the oxalate-associated disease, disorder, or condition is a kidney stone formation disease, disorder, or condition, or a calcium oxalate tissue deposition disease, disorder, or condition.

[0093] In one embodiment, the kidney stone formation disease, disorder, or condition is a calcium oxalate stone formation disease, disorder, or condition or a non-calcium oxalate stone formation disease, disorder, or condition.

[0094] In one embodiment, the calcium oxalate stone formation disease, disorder, or condition is a hyperoxaluria disease, disorder, or condition or a non-hyperoxaluria disease, disorder, or condition.

[0095] In one embodiment, the hyperoxaluria disease, disorder, or condition is selected from the group consisting of primary hyperoxaluria, enteric hyperoxaluria, dietary hyperoxaluria, and idiopathic hyperoxaluria.

[0096] In one embodiment, the non-hyperoxaluria stone formation disease, disorder, or condition is hypercalciuria and/or hypocitraturia.

[0097] In one embodiment, the non-hyperoxaluria stone formation disease, disorder, or condition is calcium oxalate or non-calcium oxalate kidney stone formation disease.

[0098] In one embodiment, the calcium oxalate tissue deposition disease, disorder, or condition is selected from the group consisting of systemic calcium oxalate tissue deposition disease, disorder, or condition or tissue specific calcium oxalate tissue deposition disease, disorder, or condition.

[0099] In one embodiment, the lactate dehydrogenase-associated disease, disorder, or condition is selected from the group consisting of cancer, fatty liver (steatosis), nonalcoholic steatohepatitis (NASH), cirrhosis of the liver, accumulation of fat in the liver, inflammation of the liver, hepatocellular necrosis, liver fibrosis, and nonalcoholic fatty liver disease (NAFLD). In one embodiment, the disease, disorder or condition is primary hyperoxaluria 2 (PH2).

[0100] In one embodiment, the method further comprises altering the diet of the subject (e.g., decreasing protein intake, decreasing sodium intake, decreasing ascorbic acid intake, moderatating calcium intake, supplementing phosphate, supplementing magnesium, and pyridoxine treatment; and a combination of any of the foregoing).

[0101] In one embodiment, the subject further receives a kidney transplant.

[0102] In one embodiment, the subject is human.

[0103] In one embodiment, the methods further include administering an additional therapeutic to the subject.

[0104] In one embodiment, the RNAi agent is administered to the subject at a dose of about 0.01 mg/kg to about 10 mg/kg or about 0.5 mg/kg to about 50 mg/kg.

[0105] In one embodiment, the agent is administered to the subject subcutaneously.

[0106] In one embodiment, the agent does not substantially inhibit expression and/or activity of lactate dehydrogenase B (LDHB).

### BRIEF DESCRIPTION OF THE DRAWINGS

[0107] FIG. 1A is a schematic of the endogenous pathways for oxalate synthesis.

[0108] FIG. 1B is a schematic of the metabolic pathways associated with LDHA.

[0109] FIG. 2 is a graph showing the level of Ldha mRNA remaining in wild-type C57BL/6J mice at 10 days post-dose of a single 0.1 mg/kg, 0.3 mg/kg, 1.0 mg/kg, 3.0 mg/kg, or 10 mg/kg dose of AD-84788.

[0110] FIG. 3 is a graph showing hepatic LDHA activity in adult male Agxt knockout mice 4 weeks after subcutaneous administration of a single 0.3 mg/kg, 1 mg/kg, 3 mg/kg, or 10 mg/kg dose of AD-84788. Agxt knockout mice administered 0 mg/kg of AD-84788 served as untreated controls.

[0111] FIG. 4 is a schematic of the study protocol described in Example 3 and referred to in FIGS. 6-17B.

[0112] FIG. 5 is a graph showing the amount of urinary oxalate (mg per g of creatinine) excreted by Agxt knockout mice over a twenty-four hour period at weeks 0, 1, 2, 3, 4, 6, 8, 9, and 10 following subcutaneous administration of a single 0.3 mg/kg, 1 mg/kg, 3 mg/kg, or 10 mg/kg dose of AD-84788. Agxt knockout mice administered 0 mg/kg of AD-84788 served as untreated controls.

[0113] FIG. 6 is a graph showing the amount of oxalate (mg per g of creatinine) excreted in the urine of Agxt knockout mice, wild-type mice, and Grhpr (glyoxylate reductase/hydroxypyruvate reductase) knockout mice 4 weeks after a single 10 mg/kg dose of AD-84788.

[0114] FIG. 7 is a graph showing the amount of oxalate (mg per g of creatinine) excreted in the urine of Agxt deficient mice administered the dsRNA agent AD-84788 at Day 0 pre-dose (baseline, i.e., at days −6, −5, −4, and −3); at days 7-10 after a single 10 mg/kg dose of AD-84788; and at days 28-31 following the last administration of four 10/mg/kg doses of AD-84788 on days 0, 11, 18, and 25 (see, FIG. 4).

[0115] FIG. 8A is a graph showing the enzymatic activity of LdhA in wild-type liver homogenates of untreated control mice and mice administered four 10 mg/kg doses of AD-84788 (see, FIG. 4) using lactic acid as a substrate. Absorbance increases as NAD is reduced to NADH via LDH enzymatic activity. The initial linear range was selected, and absorbances at 1 and 6 minutes were utilized in specific activity calculations as Δ_{abs} across a Δₜᵢₘₑ of 5 minutes.

[0116] FIG. 8B is a graph showing the mean specific activity of LdhA in wild-type liver homogenates of untreated control mice and mice administered four 10 mg/kg doses of AD-84788 (see, FIG. 4) using lactic acid as a substrate. Specific activity is expressed as μmol NADH formed/min/g protein. Calculations were performed for all animals individually, and a t-test was conducted comparing all specific activity data from both treatment groups. Mean specific activity of both treatment groups is presented. (p<0.001).

[0117] FIG. 9A is a graph showing the enzymatic activity of LdhA in wild-type liver homogenates of untreated control mice and mice administered four 10 mg/kg doses of AD-84788 (see, FIG. 4) using glyoxylate as a substrate. Absorbance increases as NAD is reduced to NADH via LDH enzymatic activity. The initial linear range was selected, and absorbances at 0 and 4 minutes were utilized in specific activity calculations as Δ_{abs} across a Δₜᵢₘₑ of 4 minutes.

[0118] FIG. 9B is a graph showing the mean specific activity of LdhA in wild-type liver homogenates of untreated control mice and mice administered four 10 mg/kg doses of AD-84788 (see, FIG. 4) using glyoxylate as a substrate. Specific activity is expressed as μmol NADH formed/min/g protein. Calculations were performed for all animals individually, and a t-test was conducted comparing all specific activity data from both treatment groups. Mean specific activity of both treatment groups is presented. (p<0.001).

[0119] FIG. 10A is a graph showing the enzymatic activity of LdhA in Agxt deficient liver homogenates of untreated control mice and mice administered four 10 mg/kg doses of AD-84788 (see, FIG. 4) using lactic acid as a substrate. Absorbance increases as NAD is reduced to NADH via LDH enzymatic activity. The initial linear range was selected, and absorbances at 0 and 4 minutes were utilized in specific activity calculations as Δ_{abs} across a Δₜᵢₘₑ of 4 minutes. SD is too small to be visualized in the mean treated group.

[0120] FIG. 10B is a graph showing the mean specific activity of LdhA in Agxt deficient liver homogenates of untreated control mice and mice administered four 10 mg/kg doses of AD-84788 (see, FIG. 4) using lactic acid as a substrate. Specific activity is expressed as μmol NADH formed/min/g protein. Calculations were performed for all animals individually, and a t-test was conducted comparing all specific activity data from both treatment groups. Mean specific activity of both treatment groups is presented. (p<0.001).

[0121] FIG. 11A is a graph showing the enzymatic activity of LdhA in Agxt deficient liver homogenates of untreated control mice and mice administered four 10 mg/kg doses of AD-84788 (see, FIG. 4) using glyoxylate as a substrate. Absorbance increases as NAD is reduced to NADH via LDH enzymatic activity. The initial linear range was selected, and absorbances at 0 and 4 minutes were utilized in specific activity calculations as Δ_{abs} across a Δₜᵢₘₑ of 4 minutes.

[0122] FIG. 11B is a graph showing the mean specific activity of LdhA in Agxt deficient liver homogenates of untreated control mice and mice administered four 10 mg/kg doses of AD-84788 (see, FIG. 4) using glyoxylate as a substrate. Specific activity is expressed as μmol NADH formed/min/g protein. Calculations were performed for all animals individually, and a t-test was conducted comparing all specific activity data from both treatment groups. Mean specific activity of both treatment groups is presented. (p<0.001).

[0123] FIG. 12A is a graph showing the enzymatic activity of LdhA in wild-type heart homogenates of untreated control mice and mice administered four 10 mg/kg doses of AD-84788 (see, FIG. 4) using lactic acid as a substrate. Absorbance for both the control group and the treatment group increases as NAD is reduced to NADH via LDH enzymatic activity. The initial linear range was selected, and absorbances at 0 and 4 minutes were utilized in specific activity calculations as Δ_{abs} across a Δₜᵢₘₑ of 4 minutes.

[0124] FIG. 12B is a graph showing the mean specific activity of LdhA in wild-type heart homogenates of untreated control mice and mice administered four 10 mg/kg doses of AD-84788 (see, FIG. 4) using lactic acid as a substrate. Specific activity is expressed as μmol NADH formed/min/g protein. Calculations were performed for all animals individually, and a t-test was conducted comparing all specific activity data from both treatment groups. Mean specific activity of both treatment groups is presented. There is no significant difference.

[0125] FIG. 12C is a graph showing the enzymatic activity of LdhA in wild-type thigh muscle homogenates of untreated control mice and mice administered four 10 mg/kg doses of AD-84788 (see, FIG. 4) using lactic acid as a substrate. Absorbance for both the control group and the treatment group increases as NAD is reduced to NADH via LDH enzymatic activity. The initial linear range was selected, and absorbances at 0 and 4 minutes were utilized in specific activity calculations as Δ_{abs} across a Δₜᵢₘₑ of 4 minutes.

[0126] FIG. 12D is a graph showing the mean specific activity of LdhA in wild-type thigh muscle homogenates of untreated control mice and mice administered four 10 mg/kg doses of AD-84788 (see, FIG. 4) using lactic acid as a substrate. Specific activity is expressed as μmol NADH formed/min/g protein. Calculations were performed for all animals individually, and a t-test was conducted comparing all specific activity data from both treatment groups. Mean specific activity of both treatment groups is presented. There is no significant difference.

[0127] FIG. 13A is a graph showing the mean amount of lactate in wild-type liver homogenates of wild-type mice prior to the administration of four 10 mg/kg doses of AD-84788 (baseline) and the mean amount of lactate in wild-type liver homogenates of wild-type mice four weeks after the administration of four 10 mg/kg doses of AD-84788 (see, FIG. 4).

[0128] FIG. 13B is a graph showing the mean amount of pyruvate in wild-type liver homogenates of wild-type mice prior to the administration of four 10 mg/kg doses of AD-84788 (baseline) and the mean amount of pyruvate in wild-type liver homogenates of wild-type mice four weeks after the administration of four 10 mg/kg doses of AD-84788 (see, FIG. 4).

[0129] FIG. 14A is a graph showing the mean amount of lactate in Agxt deficient liver homogenates of Agxt deficient mice prior to the administration of four 10 mg/kg doses of AD-84788 (baseline) and the mean amount of lactate in Agxt deficient liver homogenates of Agxt deficient mice four weeks after the administration of four 10 mg/kg doses of AD-84788 (see, FIG. 4).

[0130] FIG. 14B is a graph showing the mean amount of pyruvate in Agxt deficient liver homogenates of Agxt deficient mice prior to the administration of four 10 mg/kg doses of AD-84788 (baseline) and the mean amount of pyruvate in Agxt deficient liver homogenates of Agxt deficient mice four weeks after the administration of four 10 mg/kg doses of AD-84788 (see, FIG. 4)

[0131] FIG. 15A is a graph showing the mean amount of glyoxylate in wild-type liver homogenates of wild-type mice prior to the administration of four 10 mg/kg doses of AD-84788 (baseline) and the mean amount of glyoxylate in wild-type liver homogenates of wild-type mice four weeks after the administration of four 10 mg/kg doses of AD-84788 (see, FIG. 4).

[0132] FIG. 15B is a graph showing the mean amount of glyoxylate in Agxt deficient liver homogenates of Agxt deficient mice prior to the administration of four 10 mg/kg doses of AD-84788 (baseline) and the mean amount of glyoxylate in Agxt deficient liver homogenates of Agxt deficient mice four weeks after the administration of four 10 mg/kg doses of AD-84788 (see, FIG. 4).

[0133] FIG. 16A is a graph showing the mean body weights of wild-type mice prior to the administration of four 10 mg/kg doses of AD-84788 (baseline) and the mean body weights of wild-type mice four weeks after the administration of four 10 mg/kg doses of AD-84788 (see, FIG. 4).

[0134] FIG. 16B is a graph showing the mean body weights of Agxt deficient mice prior to the administration of four 10 mg/kg doses of AD-84788 (baseline) and the mean body weights of Agxt deficient mice four weeks after the administration of four 10 mg/kg doses of AD-84788 (see, FIG. 4).

[0135] FIG. 17A is a graph showing the mean plasma lactate levels of wild-type mice prior to the administration of four 10 mg/kg doses of AD-84788 (baseline) and the mean plasma lactate levels of wild-type mice four weeks after the administration of four 10 mg/kg doses of AD-84788 (see, FIG. 4).

[0136] FIG. 17B is a graph showing the mean plasma lactate levels of Agxt deficient mice prior to the administration of four 10 mg/kg doses of AD-84788 (baseline) and the mean plasma lactate levels of Agxt deficient mice four weeks after the administration of four 10 mg/kg doses of AD-84788 (see, FIG. 4).

[0137] FIGS. 18A-18O depict exemplary dual targeting agents of the invention.

[0138] FIG. 18A depicts an exemplary dual targeting agent of the invention comprising a first dsRNA agent targeting LDHA and a second dsRNA agent targeting HAO1, wherein the first dsRNA agent comprises a first sense strand (S) and a first antisense strand (AS), wherein the second dsRNA agent comprises a second sense strand (S) and a second antisense strand, wherein the 3′end of the first sense strand is covalently attached to the 5′ end of the second sense strand with a nucleotide linker comprising 2′OMe modified nucleotides (uuu), wherein the 3′ end of the second sense strand comprises a GalNAc ligand, and wherein the two 5′-most nucleotides of the first sense strand each independently comprise a phosphorothioate linkage.

[0139] FIG. 18B depicts an exemplary dual targeting agent of the invention comprising a first dsRNA agent targeting LDHA and a second dsRNA agent targeting HAO1, wherein the first dsRNA agent comprises a first sense strand (S) and a first antisense strand (AS), wherein the second dsRNA agent comprises a second sense strand (S) and a second antisense strand (AS). wherein the 3′end of the first sense strand is covalently attached to the 5′ end of the second sense strand with a nucleotide linker comprising 2′ Fluoro modified nucleotides (GfAfAf), wherein the 3′ end of the second sense strand comprises a GalNAc ligand, and wherein the two 5′-most nucleotides of the first sense strand, the 3′-most nucleotide of the first sense strand, and the 5′-most nucleotide of the second sense strand each independently comprise a phosphorothioate linkage.

[0140] FIG. 18C depicts an exemplary dual targeting agent of the invention comprising a first dsRNA agent targeting LDHA and a second dsRNA agent targeting HAO1, wherein the first dsRNA agent comprises a first sense strand (S) and a first antisense strand (AS), wherein the second dsRNA agent comprises a second sense strand (S) and a second antisense strand (AS), wherein the 3′end of the first sense strand is covalently attached to the 5′ end of the second sense strand with a nucleotide linker comprising 2′Fluoro modified nucleotides (GfAffUf), wherein the 3′ end of the second sense strand comprises a GalNAc ligand, and wherein the two 5′-most nucleotides of the first sense strand, the 3′-most nucleotide of the first sense strand, and the 5′-most nucleotide of the second sense strand each independently comprise a phosphorothioate linkage.

[0141] FIG. 18D depicts an exemplary dual targeting agent of the invention comprising a first dsRNA agent targeting LDHA and a second dsRNA agent targeting HAO1, wherein the first dsRNA agent comprises a first sense strand (S) and a first antisense strand (AS), wherein the second dsRNA agent comprises a second sense strand (S) and a second antisense strand (AS), wherein the 3′end of the first sense strand is covalently attached to the 5′ end of the second sense strand with a nucleotide linker comprising deoxynucleotides (dgdada), wherein the 3′ end of the second sense strand comprises a GalNAc ligand, and wherein the two 5′-most nucleotides of the first sense strand, the 3′-most nucleotide of the first sense strand, and the 5′-most nucleotide of the second sense strand each independently comprise a phosphorothioate linkage.

[0142] FIG. 18E depicts an exemplary dual targeting agent of the invention comprising a first dsRNA agent targeting LDHA and a second dsRNA agent targeting HAO1, wherein the first dsRNA agent comprises a first sense strand (S) and a first antisense strand (AS), wherein the second dsRNA agent comprises a second sense strand (5) and a second antisense strand (AS), wherein the 3′end of the first sense strand is covalently attached to the 5′ end of the second sense strand with a nucleotide linker comprising deoxynucleotides (dgda), wherein the 3′ end of the second sense strand comprises a GalNAc ligand, and wherein the two 5′-most nucleotides of the first sense strand, the 3′-most nucleotide of the first sense strand, and the 5′-most nucleotide of the second sense strand each independently comprise a phosphorothioate linkage.

[0143] FIG. 18F depicts an exemplary dual targeting agent of the invention comprising a first dsRNA agent targeting LDHA and a second dsRNA agent targeting HAO1, wherein the first dsRNA agent comprises a first sense strand (S) and a first antisense strand (AS), wherein the second dsRNA agent comprises a second sense strand (S) and a second antisense strand (AS), and the 3′end of the first sense strand is directly attached (no linker) to the 5′ end of the second sense strand, wherein the two 5′-most nucleotides of the first sense strand and the two 3′-most nucleotides of the second sense strand each independently comprise a phosphorothioate linkage, and wherein the 3′ end of the first sense strand comprises a GalNAc ligand.

[0144] FIG. 18G depicts an exemplary dual targeting agent of the invention comprising a first dsRNA agent targeting LDHA and a second dsRNA agent targeting HAO1, wherein the first dsRNA agent comprises a first sense strand (S) and a first antisense strand (AS), wherein the second dsRNA agent comprises a second sense strand (S) and a second antisense strand (AS), wherein the 5′end of the first antisense strand is covalently attached to the 3′ end of the second antisense strand with a nucleotide linker comprising 2′OMe modified nucleotides (acu), wherein the 3′ end of the second sense strand comprises a GalNAc ligand, and wherein the two 3′-most nucleotides of the first antisense strand and the two 5′-most nucleotides of the second antisense strand each independently comprise a phosphorothioate linkage.

[0145] FIG. 18H depicts an exemplary dual targeting agent of the invention comprising a first dsRNA agent targeting LDHA and a second dsRNA agent targeting HAO1, wherein the first dsRNA agent comprises a first sense strand (S) and a first antisense strand (AS), wherein the second dsRNA agent comprises a second sense strand (5) and a second antisense strand (AS), wherein the 5′end of the first antisense strand is covalently attached to the 3′ end of the second antisense strand with a nucleotide linker comprising 2′Flouro modified nucleotides (AfAfGf), wherein the 3′ end of the second sense strand comprises a GalNAc ligand, and wherein the two 3′-most nucleotides of the first antisense strand, the 5′ nucleotide of the first antisense strand, the 3′ nucleotide of the second antisense strand, and the two 5′-most nucleotides of the second antisense strand each independently comprise a phosphorothioate linkage.

[0146] FIG. 18I depicts an exemplary dual targeting agent of the invention comprising a first dsRNA agent targeting LDHA and a second dsRNA agent targeting HAO1, wherein the first dsRNA agent comprises a first sense strand (S) and a first antisense strand (AS), wherein the second dsRNA agent comprises a second sense strand (S) and a second antisense strand (AS), wherein the 5′end of the first antisense strand is directly attached (no linker) to the 3′ end of the second antisense strand, wherein the 3′ end of the second sense strand comprises a GalNAc ligand, and wherein the two 3′-most nucleotides of the first antisense strand and the two 5′-most nucleotides of the second antisense strand each independently comprise a phosphorothioate linkage.

[0147] FIG. 18J depicts an exemplary dual targeting agent of the invention comprising a first dsRNA agent targeting LDHA and a second dsRNA agent targeting HAO1, wherein the first dsRNA agent comprises a first sense strand (S) and a first antisense strand (AS), wherein the second dsRNA agent comprises a second sense strand (5) and a second antisense strand (AS), wherein the 3′end of the first sense strand is covalently attached to the 5′ end of the second sense strand with a nucleotide linker comprising 2′ OMe modified nucleotides (uuu), wherein the 5′ end of the first sense strand and the 3′ end of the second sense strand each independently comprise a GAlNAc ligand, and wherein the 5′ nucleotide of the first sense strand comprises a phosphorothioate linkage.

[0148] FIG. 18K depicts an exemplary dual targeting agent of the invention comprising a first dsRNA agent targeting LDHA and a second dsRNA agent targeting HAO1, wherein the first dsRNA agent comprises a first sense strand (S) and a first antisense strand (AS), wherein the second dsRNA agent comprises a second sense strand (S) and a second antisense strand (AS), wherein the 3′end of the first sense strand is covalently attached to the 5′ end of the second sense strand with a nucleotide linker comprising 2′Fluoro modified nucleotides (GfAfAt), wherein the 5′ end of the first sense strand and the 3′ end of the second sense strand each independently comprise a GalNAc ligand, and wherein the 5′ nucleotide of the first sense strand, the 3′ nucleotide of the first sense strand, and the 5′ nucleotide of the second sense strand each independently comprise a phosphorothioate linkage.

[0149] FIG. 18L depicts an exemplary dual targeting agent of the invention comprising a first dsRNA agent targeting LDHA and a second dsRNA agent targeting HAO1, wherein the first dsRNA agent comprises a first sense strand (S) and a first antisense strand (AS), wherein the second dsRNA agent comprises a second sense strand (S) and a second antisense strand (AS), wherein the 3′end of the first sense strand is directly attached (no linker) to the 5′ end of the second sense strand, wherein the 3′ end of the first sense strand and the 3′ end of the second sense strand each independently comprise a GalNAc ligand, and wherein the two 5′-most nucleotides of the first sense strand each independently comprise a phosphorothioate linkage.

[0150] FIG. 18M depicts an exemplary dual targeting agent of the invention comprising a first dsRNA agent targeting LDHA and a second dsRNA agent targeting HAO1, wherein the first dsRNA agent comprises a first sense strand (S) and a first antisense strand (AS), wherein the second dsRNA agent comprises a second sense strand (S) and a second antisense strand (AS), wherein the 5′end of the first antisense strand is covalently attached to the 3′ end of the second antisense strand with a nucleotide linker comprising 2′-O-Me modified nucleotides (acu), wherein the 3′ end of the first antisense strand and the 3′ end of the second sense strand each independently comprise a GalNAc ligand, and wherein the two most 5′ nucleotides of the second antisense strand each independently comprise a phosphorothioate linkage.

[0151] FIG. 18N depicts an exemplary dual targeting agent of the invention comprising a first dsRNA agent targeting LDHA and a second dsRNA agent targeting HAO1, wherein the first dsRNA agent comprises a first sense strand (S) and a first antisense strand (AS), wherein the second dsRNA agent comprises a second sense strand (S) and a second antisense strand (AS), wherein the 5′end of the first antisense strand is covalently attached to the 3′ end of the second antisense strand with a nucleotide linker comprising 2′Fluoro modified nucleotides (AfAfGf), wherein the 3′ end of the first antisense strand and the 3′ end of the second sense strand each independently comprise a GalNAc ligand, and wherein the 5′ nucleotide of the first antisense strand, the 3′ nucleotide of the second antisense strand, and the two 5′-most nucleotides of the second antisense strand each independently comprise a phosphorothioate linkage.

[0152] FIG. 18O depicts an exemplary dual targeting agent of the invention comprising a first dsRNA agent targeting LDHA and a second dsRNA agent targeting HAO1, wherein the first dsRNA agent comprises a first sense strand (S) and a first antisense strand (AS), wherein the second dsRNA agent comprises a second sense strand (S) and a second antisense strand (AS), wherein the 5′end of the first antisense strand is directly attached (no linker) to the 3′ end of the second antisense strand, wherein the 3′ end of the first antisense strand and the 3′ end of the second sense strand each independently comprise a GalNAc ligand, and wherein the two most 5′ nucleotides of the second antisense strand each independently comprise a phosphorothioate linkage.

### DETAILED DESCRIPTION OF THE INVENTION

[0153] The present invention provides iRNA compositions, which effect the RNA-induced silencing complex (RISC)-mediated cleavage of RNA transcripts of an LDHA gene. The LDHA gene may be within a cell, e.g., a cell within a subject, such as a human. The present invention also provides methods of using the iRNA compositions of the invention for inhibiting the expression of an LDHA gene, and for treating a subject who would benefit from inhibiting or reducing the expression of an LDHA gene, e.g., a subject that would benefit from a reduction or inhibition in urinary oxalate production, e.g., a subject suffering or prone to suffering from an oxalate pathway-associated disease disorder, or condition, such as a subject suffering or prone to suffering from an oxalate-associated disease, disorder, or condition, e.g., a kidney stone formation disease, disorder, or condition or a calcium oxalate tissue deposition disease, disorder, or condition; or an LDH-associated disease, disorder, or condition.

[0154] The present invention also provides methods of using the iRNA compositions of the invention for inhibiting the expression of an LDHA gene and an HAO1 gene for treating a subject who would benefit from inhibiting or reducing the expression of an LDHA gene and an HAO1 gene, e.g., a subject that would benefit from a reduction or inhibition in urinary oxalate production, e.g., a subject suffering or prone to suffering from an oxalate pathway-associated disease disorder, or condition, such as a subject suffering or prone to suffering from an oxalate-associated disease, disorder, or condition, e.g., a kidney stone formation disease, disorder, or condition or a calcium oxalate tissue deposition disease, disorder, or condition; or an LDH-associated disease, disorder, or condition.

[0155] The iRNAs of the invention targeting LDHA may include an RNA strand (the antisense strand) having a region which is about 30 nucleotides or less in length, e.g., 15-30, 15-29, 15-28, 15-27, 15-26, 15-25, 15-24, 15-23, 15-22, 15-21, 15-20, 15-19, 15-18, 15-17, 18-30, 18-29, 18-28, 18-27, 18-26, 18-25, 18-24, 18-23, 18-22, 18-21, 18-20, 19-30, 19-29, 19-28, 19-27, 19-26, 19-25, 19-24, 19-23, 19-22, 19-21, 19-20, 20-30, 20-29, 20-28, 20-27, 20-26, 20-25, 20-24, 20-23, 20-22, 20-21, 21-30, 21-29, 21-28, 21-27, 21-26, 21-25, 21-24, 21-23, or 21-22 nucleotides in length, which region is substantially complementary to at least part of an mRNA transcript of an LDHA gene.

[0156] The iRNAs of the invention targeting HAO1 may include an RNA strand (the antisense strand) having a region which is about 30 nucleotides or less in length, e.g., 15-30, 15-29, 15-28, 15-27, 15-26, 15-25, 15-24, 15-23, 15-22, 15-21, 15-20, 15-19, 15-18, 15-17, 18-30, 18-29, 18-28, 18-27, 18-26, 18-25, 18-24, 18-23, 18-22, 18-21, 18-20, 19-30, 19-29, 19-28, 19-27, 19-26, 19-25, 19-24, 19-23, 19-22, 19-21, 19-20, 20-30, 20-29, 20-28, 20-27, 20-26, 20-25, 20-24, 20-23, 20-22, 20-21, 21-30, 21-29, 21-28, 21-27, 21-26, 21-25, 21-24, 21-23, or 21-22 nucleotides in length, which region is substantially complementary to at least part of an mRNA transcript of an HAO1 gene.

[0157] When the RNAi agent is a dual targeting RNAi agent, as described herein, the agent targeting LDHA may include an antisense strand comprising a region of complementarity to LDHA which is the same length or a different length from the region of complementarity of the antisense strand of the agent targeting HAO1.

[0158] In some embodiments, one or both of the strands of the double stranded RNAi agents of the invention is up to 66 nucleotides in length, e.g., 36-66, 26-36, 25-36, 31-60, 22-43, 27-53 nucleotides in length, with a region of at least 19 contiguous nucleotides that is substantially complementary to at least a part of an mRNA transcript of an LDHA gene. In some embodiments, such iRNA agents having longer length antisense strands may include a second RNA strand (the sense strand) of 20-60 nucleotides in length wherein the sense and antisense strands form a duplex of 18-30 contiguous nucleotides.

[0159] In other embodiments, one or both of the strands of the double stranded RNAi agents of the invention is up to 66 nucleotides in length, e.g., 36-66, 26-36, 25-36, 31-60, 22-43, 27-53 nucleotides in length, with a region of at least 19 contiguous nucleotides that is substantially complementary to at least a part of an mRNA transcript of an HAO1 gene. In some embodiments, such iRNA agents having longer length antisense strands may include a second RNA strand (the sense strand) of 20-60 nucleotides in length wherein the sense and antisense strands form a duplex of 18-30 contiguous nucleotides.

[0160] In embodiments in which a first dsRNA agent targeting LDHA and a second dsRNA agent targeting HAO1 are covalently attached, the duplex lengths of the first agent and the second agent may be the same or different.

[0161] The use of these iRNA agents described herein enables the targeted degradation of mRNAs of an LDHA gene in mammals or the targeted degradation of an LDHA gene and an HAO1 gene in mammals.

[0162] Very low dosages of the iRNAs, in particular, can specifically and efficiently mediate RNA interference (RNAi), resulting in significant inhibition of expression of an LDHA gene or an LDHA gene and an HAO1 gene. Using cell-based and in vivo assays, the present inventors have demonstrated that iRNAs targeting LDHA can mediate RNAi, resulting in significant inhibition of expression of an LDHA gene and significant inhibition of oxalate production. Thus, methods and compositions including these iRNAs are useful for treating a subject who would benefit by a reduction or inhibition in LDHA expression or LDHA expression and HAO1 expression, e.g., a subject suffering or prone to suffering from an oxalate pathway-associated disease, disorder, or condition.

[0163] The following detailed description discloses how to make and use compositions containing iRNAs to inhibit the expression of an LDHA gene, an HAO1 gene, and both an LDHA gene and an HAO1 gene, as well as compositions and methods for treating subjects having diseases and disorders that would benefit from inhibition and/or reduction of the expression of these genes.

### I. Definitions

[0164] In order that the present invention may be more readily understood, certain terms are first defined. In addition, it should be noted that whenever a value or range of values of a parameter are recited, it is intended that values and ranges intermediate to the recited values are also intended to be part of this invention.

[0165] The articles “a” and “an” are used herein to refer to one or to more than one (i.e., to at least one) of the grammatical object of the article. By way of example, “an element” means one element or more than one element, e.g., a plurality of elements.

[0166] The term “including” is used herein to mean, and is used interchangeably with, the phrase “including but not limited to”. The term “or” is used herein to mean, and is used interchangeably with, the term “and/or,” unless context clearly indicates otherwise.

[0167] The term “LDHA” (used interchangeable herein with the term “Ldha”), also known as Cell Proliferation-Inducing Gene 19 Protein, Renal Carcinoma Antigen NY-REN-59, LDH Muscle Subunit, EC 1.1.1.27 4 61, LDH-A, LDH-M, Epididymis Secretory Sperm Binding Protein Li 133P, L-Lactate Dehydrogenase A Chain, Proliferation-Inducing Gene 19, Lactate Dehydrogenase M, HEL-S-133P, EC 1.1.1, GSD11, PIG19, and LDHM, refers to the well known gene encoding a lactate dehydrogenase A from any vertebrate or mammalian source, including, but not limited to, human, bovine, chicken, rodent, mouse, rat, porcine, ovine, primate, monkey, and guinea pig, unless specified otherwise.

[0168] The term also refers to fragments and variants of native LDHA that maintain at least one in vivo or in vitro activity of a native LDHA. The term encompasses full-length unprocessed precursor forms of LDHA as well as mature forms resulting from post-translational cleavage of the signal peptide and forms resulting from proteolytic processing.

[0169] The sequence of a human LDHA mRNA transcript can be found at, for example, GenBank Accession No. GI: 207028493 (NM_001135239.1; SEQ ID NO:1), GenBank Accession No. GI: 260099722 (NM_001165414.1; SEQ ID NO:3), GenBank Accession No. GI: 260099724 (NM_001165415.1; SEQ ID NO:5), GenBank Accession No. GI: 260099726 (NM_001165416.1; SEQ ID NO:7), GenBank Accession No. GI: 207028465 (NM_005566.3; SEQ ID NO:9); the sequence of a mouse LDHA mRNA transcript can be found at, for example, GenBank Accession No. GI: 257743038 (NM_001136069.2; SEQ ID NO:11), GenBank Accession No. GI: 257743036(NM_010699.2; SEQ ID NO:13); the sequence of a rat LDHA mRNA transcript can be found at, for example, GenBank Accession No. GI: 8393705 (NM_017025.1; SEQ ID NO:15); and the sequence of a monkey LDHA mRNA transcript can be found at, for example, GenBank Accession No. GI: 402766306 (NM_001257735.2; SEQ ID NO:17), GenBank Accession No. GI: 545687102 (NM_001283551.1; SEQ ID NO:19).

[0170] Additional examples of LDHA mRNA sequences are readily available using publicly available databases, e.g., GenBank, UniProt, and OMIM.

[0171] The term“LDHA” as used herein also refers to a particular polypeptide expressed in a cell by naturally occurring DNA sequence variations of the LDHA gene, such as a single nucleotide polymorphism in the LDHA gene. Numerous SNPs within the LDHA gene have been identified and may be found at, for example, NCBI dbSNP (see, e.g., www.ncbi.nlm nih.gov/snp).

[0172] As used herein, the term “HAO1” refers to the well known gene encoding the enzyme hydroxyacid oxidase 1 from any vertebrate or mammalian source, including, but not limited to, human, bovine, chicken, rodent, mouse, rat, porcine, ovine, primate, monkey, and guinea pig, unless specified otherwise. Other gene names include GO, GOX, GOX1, HAO, and HAOX1. The protein is also known as glycolate oxidase and (S)-2-hydroxy-acid oxidase.

[0173] The term also refers to fragments and variants of native HAO1 that maintain at least one in vivo or in vitro activity of a native HAO1. The term encompasses full-length unprocessed precursor forms of HAO1 as well as mature forms resulting from post-translational cleavage of the signal peptide and forms resulting from proteolytic processing. The sequence of a human HAO1 mRNA transcript can be found at, for example, GenBank Accession No. GI:11184232 (NM_017545.2; SEQ ID NO:21); the sequence of a monkey HAO1 mRNA transcript can be found at, for example, GenBank Accession No. GI:544464345 (XM_005568381.1; SEQ I DNO:23); the sequence of a mouse HAO1 mRNA transcript can be found at, for example, GenBank Accession No. GI:133893166 (NM_010403.2; SEQ ID NO:25); and the sequence of a rat HAO1 mRNA transcript can be found at, for example, GenBank Accession No. GI: 166157785 (NM_001107780.2; SEQ ID NO:27).

[0174] The term“HAO1,” as used herein, also refers to naturally occurring DNA sequence variations of the HAO1 gene, such as a single nucleotide polymorphism (SNP) in the HAO1 gene. Exemplary SNPs may be found in the NCBI dbSNP Short Genetic Variations database available at www.ncbi.nlm.nih.gov/projects/SNP.

[0175] As used herein, “target sequence” refers to a contiguous portion of the nucleotide sequence of an mRNA molecule formed during the transcription of an LDHA gene or an HAO1 gene, including mRNA that is a product of RNA processing of a primary transcription product. In one embodment, the target portion of the sequence will be at least long enough to serve as a substrate for iRNA-directed cleavage at or near that portion of the nucleotide sequence of an mRNA molecule formed during the transcription of an LDHA gene. In another embodment, the target portion of the sequence will be at least long enough to serve as a substrate for iRNA-directed cleavage at or near that portion of the nucleotide sequence of an mRNA molecule formed during the transcription of an HAO1 gene.

[0176] The target sequence of an LDHA gene may be from about 9-36 nucleotides in length, e.g., about 15-30 nucleotides in length. For example, the target sequence can be from about 15-30 nucleotides, 15-29, 15-28, 15-27, 15-26, 15-25, 15-24, 15-23, 15-22, 15-21, 15-20, 15-19, 15-18, 15-17, 18-30, 18-29, 18-28, 18-27, 18-26, 18-25, 18-24, 18-23, 18-22, 18-21, 18-20, 19-30, 19-29, 19-28, 19-27, 19-26, 19-25, 19-24, 19-23, 19-22, 19-21, 19-20, 20-30, 20-29, 20-28, 20-27, 20-26, 20-25, 20-24,20-23, 20-22, 20-21, 21-30, 21-29, 21-28, 21-27, 21-26, 21-25, 21-24, 21-23, or 21-22 nucleotides in length. Ranges and lengths intermediate to the above recited ranges and lengths are also contemplated to be part of the invention.

[0177] The target sequence of an HAO1 gene may be from about 9-36 nucleotides in length, e.g., about 15-30 nucleotides in length. For example, the target sequence can be from about 15-30 nucleotides, 15-29, 15-28, 15-27, 15-26, 15-25, 15-24, 15-23, 15-22, 15-21, 15-20, 15-19, 15-18, 15-17, 18-30, 18-29, 18-28, 18-27, 18-26, 18-25, 18-24, 18-23, 18-22, 18-21, 18-20, 19-30, 19-29, 19-28, 19-27, 19-26, 19-25, 19-24, 19-23, 19-22, 19-21, 19-20, 20-30, 20-29, 20-28, 20-27, 20-26, 20-25, 20-24,20-23, 20-22, 20-21, 21-30, 21-29, 21-28, 21-27, 21-26, 21-25, 21-24, 21-23, or 21-22 nucleotides in length. Ranges and lengths intermediate to the above recited ranges and lengths are also contemplated to be part of the invention.

[0178] In aspects in which a first dsRNA agent targeting LDHA and a second dsRNA agent targeting HAO1 are covalently attached (i.e., a dual targeting RNAi agent), the length of the LDHA target sequence may be the same as the HAO1 target sequence or different.

[0179] As used herein, the term “strand comprising a sequence” refers to an oligonucleotide comprising a chain of nucleotides that is described by the sequence referred to using the standard nucleotide nomenclature.

[0180] “G,” “C,” “A,” “T” and “U” each generally stand for a nucleotide that contains guanine, cytosine, adenine, thymidine and uracil as a base, respectively. However, it will be understood that the term “ribonucleotide” or “nucleotide” can also refer to a modified nucleotide, as further detailed below, or a surrogate replacement moiety (see, e.g., Table 1). The skilled person is well aware that guanine, cytosine, adenine, and uracil can be replaced by other moieties without substantially altering the base pairing properties of an oligonucleotide comprising a nucleotide bearing such replacement moiety. For example, without limitation, a nucleotide comprising inosine as its base can base pair with nucleotides containing adenine, cytosine, or uracil. Hence, nucleotides containing uracil, guanine, or adenine can be replaced in the nucleotide sequences of dsRNA featured in the invention by a nucleotide containing, for example, inosine. In another example, adenine and cytosine anywhere in the oligonucleotide can be replaced with guanine and uracil, respectively to form G-U Wobble base pairing with the target mRNA. Sequences containing such replacement moieties are suitable for the compositions and methods featured in the invention.

[0181] The terms “iRNA”, “RNAi agent,” “iRNA agent,”, “RNA interference agent” as used interchangeably herein, refer to an agent that contains RNA as that term is defined herein, and which mediates the targeted cleavage of an RNA transcript via an RNA-induced silencing complex (RISC) pathway. iRNA directs the sequence-specific degradation of mRNA through a process known as RNA interference (RNAi). The iRNA modulates, e.g., inhibits, the expression of LDHA and/or HAO1 gene in a cell, e.g., a cell within a subject, such as a mammalian subject.

[0182] In one embodiment, an RNAi agent of the invention includes a single stranded RNA that interacts with a target RNA sequence, e.g., an LDHA target mRNA sequence and/or an HAO1 target mRNA seuqnce, to direct the cleavage of the target RNA. Without wishing to be bound by theory it is believed that long double stranded RNA introduced into cells is broken down into siRNA by a Type III endonuclease known as Dicer (Sharp et al. (2001) Genes Dev. 15:485). Dicer, a ribonuclease-III-like enzyme, processes the dsRNA into 19-23 base pair short interfering RNAs with characteristic two base 3′ overhangs (Bernstein, et al., (2001) Nature 409:363). The siRNAs are then incorporated into an RNA-induced silencing complex (RISC) where one or more helicases unwind the siRNA duplex, enabling the complementary antisense strand to guide target recognition (Nykanen, et al., (2001) Cell 107:309). Upon binding to the appropriate target mRNA, one or more endonucleases within the RISC cleave the target to induce silencing (Elbashir, et al., (2001) Genes Dev. 15:188). Thus, in one aspect the invention relates to a single stranded RNA (sssiRNA) generated within a cell and which promotes the formation of a RISC complex to effect silencing of the target gene, i.e., an LDHA gene and/or an HAO1 gene. Accordingly, the term “siRNA” is also used herein to refer to an RNAi as described above.

[0183] In another embodiment, the RNAi agent may be a single-stranded RNAi agent that is introduced into a cell or organism to inhibit a target mRNA. Single-stranded RNAi agents (ssRNAi) bind to the RISC endonuclease, Argonaute 2, which then cleaves the target mRNA. The single-stranded siRNAs are generally 15-30 nucleotides and are chemically modified. The design and testing of single-stranded RNAi agents are described in U.S. Pat. No. 8,101,348 and in Lima et al., (2012) Cell 150: 883-894, the entire contents of each of which are hereby incorporated herein by reference. Any of the antisense nucleotide sequences described herein may be used as a single-stranded siRNA as described herein or as chemically modified by the methods described in Lima et al., (2012) Cell 150:883-894.

[0184] In another embodiment, an “iRNA” for use in the compositions and methods of the invention is a double-stranded RNA and is referred to herein as a “double stranded RNAi agent,” “double-stranded RNA (dsRNA) molecule,” “dsRNA agent,” or “dsRNA”. The term “dsRNA”, refers to a complex of ribonucleic acid molecules, having a duplex structure comprising two anti-parallel and substantially complementary nucleic acid strands, referred to as having “sense” and “antisense” orientations with respect to a target RNA, i.e., an LDHA gene and/or an HAO1 gene. In some embodiments of the invention, a double-stranded RNA (dsRNA) triggers the degradation of a target RNA, e.g., an mRNA, through a post-transcriptional gene-silencing mechanism referred to herein as RNA interference or RNAi.

[0185] In yet another embodiment, an “iRNA” for use in the compositions and methods of the invention is a “dual targeting RNAi agent.” The term “dual targeting RNAi agent” refers to a molecule comprising a first dsRNA agent comprising a complex of ribonucleic acid molecules, having a duplex structure comprising two anti-parallel and substantially complementary nucleic acid strands, referred to as having “sense” and “antisense” orientations with respect to a first target RNA, i.e., an LDHA gene, covalently attached to a molecule comprising a second dsRNA agent comprising a complex of ribonucleic acid molecules, having a duplex structure comprising two anti-parallel and substantially complementary nucleic acid strands, referred to as having “sense” and “antisense” orientations with respect to a second target RNA, i.e., an HAO1 gene. In some embodiments of the invention, a dual targeting RNAi agent triggers the degradation of the first and the second target RNAs, e.g., mRNAs, through a post-transcriptional gene-silencing mechanism referred to herein as RNA interference or RNAi.

[0186] In general, the majority of nucleotides of each strand of a dsRNA molecule are ribonucleotides, but as described in detail herein, each or both strands can also include one or more non-ribonucleotides, e.g., a deoxyribonucleotide and/or a modified nucleotide. In addition, as used in this specification, an “RNAi agent” may include ribonucleotides with chemical modifications; an RNAi agent may include substantial modifications at multiple nucleotides. As used herein, the term “modified nucleotide” refers to a nucleotide having, independently, a modified sugar moiety, a modified internucleotide linkage, and/or a modified nucleobase. Thus, the term modified nucleotide encompasses substitutions, additions or removal of, e.g., a functional group or atom, to internucleoside linkages, sugar moieties, or nucleobases. The modifications suitable for use in the agents of the invention include all types of modifications disclosed herein or known in the art. Any such modifications, as used in a siRNA type molecule, are encompassed by “RNAi agent” for the purposes of this specification and claims.

[0187] The duplex region may be of any length that permits specific degradation of a desired target RNA through a RISC pathway, and may range from about 9 to 36 base pairs in length, e.g., about 15-30 base pairs in length, for example, about 9, 10, 11, 12, 13, 14, 15, 16, 17, 18, 19, 20, 21, 22, 23, 24, 25, 26, 27, 28, 29, 30, 31, 32, 33, 34, 35, or 36 base pairs in length, such as about 15-30, 15-29, 15-28, 15-27, 15-26, 15-25, 15-24, 15-23, 15-22, 15-21, 15-20, 15-19, 15-18, 15-17, 18-30, 18-29, 18-28, 18-27, 18-26, 18-25, 18-24, 18-23, 18-22, 18-21, 18-20, 19-30, 19-29, 19-28, 19-27, 19-26, 19-25, 19-24, 19-23, 19-22, 19-21, 19-20, 20-30, 20-29, 20-28, 20-27, 20-26, 20-25, 20-24,20-23, 20-22, 20-21, 21-30, 21-29, 21-28, 21-27, 21-26, 21-25, 21-24, 21-23, or 21-22 base pairs in length. Ranges and lengths intermediate to the above recited ranges and lengths are also contemplated to be part of the invention.

[0188] In embodiments in which a first dsRNA agent targeting LDHA and a second dsRNA agent targeting HAO1 are covalently attached (i.e., a dual targeting RNAi agent), the length of the duplex region of the first agent and the second agent may be the same or different.

[0189] The two strands forming the duplex structure may be different portions of one larger RNA molecule, or they may be separate RNA molecules. Where the two strands are part of one larger molecule, and therefore are connected by an uninterrupted chain of nucleotides between the 3′-end of one strand and the 5′-end of the respective other strand forming the duplex structure, the connecting RNA chain is referred to as a “hairpin loop.” A hairpin loop can comprise at least one unpaired nucleotide. In some embodiments, the hairpin loop can comprise at least 2, at least 3, at least 4, at least 5, at least 6, at least 7, at least 8, at least 9, at least 10, at least 20, at least 23 or more unpaired nucleotides.

[0190] In embodiments in which a first dsRNA agent targeting LDHA and a second dsRNA agent targeting HAO1 are covalently attached (i.e., a dual targeting RNAi agent), the first dsRNA agent may comprise a harpin loop, the second dsRNA agent may comprise a hairpin loop, or both the first and the second dsRNA agents may independently comprise a hairpin loop.

[0191] In addition, in embodiments in which a first dsRNA agent targeting LDHA and a second dsRNA agent targeting HAO1 are covalently attached (i.e., a dual targeting RNAi agent), the first dsRNA agent may comprise unpaired nucleotides, the second dsRNA agent may comprise unpaired nucleotides, or both the first and the second dsRNA agents may independently comprise unpaired nucleotides. When both the first and the second dsRNA agents independently comprise unpaired nucleotides, the first dsRNA agent and the second dsRNA agent may comprise the same or a different number of unpaired nucleotides.

[0192] Where the two substantially complementary strands of a dsRNA are comprised by separate RNA molecules, those molecules need not, but can be covalently connected. Where the two strands are connected covalently by means other than an uninterrupted chain of nucleotides between the 3′-end of one strand and the 5′-end of the respective other strand forming the duplex structure, the connecting structure is referred to as a “linker.” The RNA strands may have the same or a different number of nucleotides. The maximum number of base pairs is the number of nucleotides in the shortest strand of the dsRNA minus any overhangs that are present in the duplex. In addition to the duplex structure, an RNAi may comprise one or more nucleotide overhangs.

[0193] In one embodiment, an RNAi agent of the invention is a dsRNA, each strand of which comprises 19-23 nucleotides, that interacts with a target RNA sequence, e.g., an LDHA target mRNA sequence, to direct the cleavage of the target RNA. In another embodiment, an RNAi agent of the invention is a dsRNA, each strand of which comprises 19-23 nucleotides, that interacts with a target RNA sequence, e.g., an HAO1 target mRNA sequence, to direct the cleavage of the target RNA. In yet other embodiments an RNAi agent of the invention comprises a first dsRNA agent, each strand of which comprises 19-23 nucleotides, that interacts with a target RNA sequence, e.g., an LDHA target mRNA sequence, to direct the cleavage of the target RNA, and a second dsRNA agent, each strand of which independently comprises 19-23 nucleotides, that interacts with a target RNA sequence, e.g., an HAO1 target mRNA sequence, to direct the cleavage of the target RNA, wherein the first and second dsRNA agents are covalently attached.

[0194] In embodiments in which a first dsRNA agent targeting LDHA and a second dsRNA agent targeting HAO1 are covalently attached (i.e., a dual targeting RNAi agent), the two strands of the first dsRNA agent may be connected covalently by means other than an uninterrupted chain of nucleotides between the 3′-end of one strand and the 5′-end of the respective other strand forming the duplex structure, the two strands of the second dsRNA agent may be connected covalently by means other than an uninterrupted chain of nucleotides between the 3′-end of one strand and the 5′-end of the respective other strand forming the duplex structure, or the two strands of the first dsRNA agent and the two strands of the second dsRNA agent may independently be connected covalently by means other than an uninterrupted chain of nucleotides between the 3′-end of one strand and the 5′-end of the respective other strand forming the duplex structure.

[0195] As used herein, the term “nucleotide overhang” refers to at least one unpaired nucleotide that protrudes from the duplex structure of an iRNA, e.g., a dsRNA. For example, when a 3′-end of one strand of a dsRNA extends beyond the 5′-end of the other strand, or vice versa, there is a nucleotide overhang. A dsRNA can comprise an overhang of at least one nucleotide; alternatively the overhang can comprise at least two nucleotides, at least three nucleotides, at least four nucleotides, at least five nucleotides or more. A nucleotide overhang can comprise or consist of a nucleotide/nucleoside analog, including a deoxynucleotide/nucleoside. The overhang(s) can be on the sense strand, the antisense strand or any combination thereof. Furthermore, the nucleotide(s) of an overhang can be present on the 5′-end, 3′-end or both ends of either an antisense or sense strand of a dsRNA.

[0196] In embodiments in which a first dsRNA agent targeting LDHA and a second dsRNA agent targeting HAO1 are covalently attached (i.e., a dual targeting RNAi agent), the first agent may comprise a nucleotide overhang, the second agent may comprise a nucleotide overhang, or both the first and the second agent may independently comprise a nucleotide overhang, e.g., the 5′ end of the sense strand of the first agent may comprise an overhang, the 3′ end of the sense strand of the first agent may comprise an overhang, the 5′ end of the antisense strand of the first agent may comprise an overhang, the 3′ end of the antisense strand of the first agent may comprise an overhang, the 5′ end and the 3′ end of the sense stand of the first agent may comprise an overhang, the 5′ end and the 3′ end of the antisense stand of the first agent may comprise an overhang, the 5′ end of the sense strand of the second agent may comprise an overhang, the 3′ end of the sense strand of the second agent may comprise an overhang, the 5′ end of the antisense strand of the second agent may comprise an overhang, the 3′ end of the antisense strand of the second agent may comprise an overhang, the 5′ end and the 3′ end of the sense stand of the second agent may comprise an overhang, the 5′ end and the 3′ end of the antisense stand of the second agent may comprise an overhang, or any combination of the foregoing.

[0197] In embodiments in which a first dsRNA agent targeting LDHA and a second dsRNA agent targeting HAO1 are covalently attached (i.e., a dual targeting RNAi agent), the length of an overhang of the first agent and the second agent may be the same or different.

[0198] In one embodiment, the antisense strand of a dsRNA has a 1-10 nucleotide, e.g., a 1, 2, 3, 4, 5, 6, 7, 8, 9, or 10 nucleotide, overhang at the 3′-end and/or the 5′-end. In one embodiment, the sense strand of a dsRNA has a 1-10 nucleotide, e.g., a 1, 2, 3, 4, 5, 6, 7, 8, 9, or 10 nucleotide, overhang at the 3′-end and/or the 5′-end. In another embodiment, one or more of the nucleotides in the overhang is replaced with a nucleoside thiophosphate.

[0199] In certain embodiments, the overhang on the sense strand or the antisense strand, or both, can include extended lengths longer than 10 nucleotides, e.g., 10-30 nucleotides, 10-25 nucleotides, 10-20 nucleotides or 10-15 nucleotides in length. In certain embodiments, an extended overhang is on the sense strand of the duplex. In certain embodiments, an extended overhang is present on the 3′end of the sense strand of the duplex. In certain embodiments, an extended overhang is present on the 5′end of the sense strand of the duplex. In certain embodiments, an extended overhang is on the antisense strand of the duplex. In certain embodiments, an extended overhang is present on the 3′end of the antisense strand of the duplex. In certain embodiments, an extended overhang is present on the 5′end of the antisense strand of the duplex. In certain embodiments, one or more of the nucleotides in the extended overhang is replaced with a nucleoside thiophosphate.

[0200] In embodiments in which a first dsRNA agent targeting LDHA and a second dsRNA agent targeting HAO1 are covalently attached (i.e., a dual targeting RNAi agent), and one and/or both strands of both the first and the second dsRNA agent independently comprise an overhang, e.g., an extended overhang, the length of the overhang may be the same or different, and/or, in some embodiments, one or more of the nucleotides in the overhang in the first dsRNA agent and one or more nucleotides in the overhang of the second dsRNA agent may be independently replaced with a nucleoside thiophosphate.

[0201] The terms “blunt” or “blunt ended” as used herein in reference to a dsRNA mean that there are no unpaired nucleotides or nucleotide analogs at a given terminal end of a dsRNA, i.e., no nucleotide overhang. One or both ends of a dsRNA can be blunt. Where both ends of a dsRNA are blunt, the dsRNA is said to be blunt ended. To be clear, a “blunt ended” dsRNA is a dsRNA that is blunt at both ends, i.e., no nucleotide overhang at either end of the molecule. Most often such a molecule will be double-stranded over its entire length.

[0202] In embodiments in which a first dsRNA agent targeting LDHA and a second dsRNA agent targeting HAO1 are covalently attached (i.e., a dual targetingRNAi agent), one or both of the dsRNA agents may independently comprise a blunt end.

[0203] The term “antisense strand” or “guide strand” refers to the strand of an iRNA, e.g., a dsRNA, which includes a region that is substantially complementary to a target sequence, e.g., an LDHA mRNA or an HAO1 mRNA.

[0204] As used herein, the term “region of complementarity” refers to the region on the antisense strand that is substantially complementary to a sequence, for example a target sequence, e.g., an LDHA nucleotide sequence or an HAO1 nucleotide sequence, as defined herein. Where the region of complementarity is not fully complementary to the target sequence, the mismatches can be in the internal or terminal regions of the molecule. Generally, the most tolerated mismatches are in the terminal regions, e.g., within 5, 4, 3, or 2 nucleotides of the 5′- and/or 3′-terminus of the iRNA.

[0205] In embodiments in which a first dsRNA agent targeting LDHA and a second dsRNA agent targeting HAO1 are covalently attached (i.e., a dual targetingRNAi agent), one or both of the dsRNA agents may independently comprise a mismatch.

[0206] The term “sense strand” or “passenger strand” as used herein, refers to the strand of an iRNA that includes a region that is substantially complementary to a region of the antisense strand as that term is defined herein.

[0207] As used herein, the term “cleavage region” refers to a region that is located immediately adjacent to the cleavage site. The cleavage site is the site on the target at which cleavage occurs.

[0208] In some embodiments, the cleavage region comprises three bases on either end of, and immediately adjacent to, the cleavage site. In some embodiments, the cleavage region comprises two bases on either end of, and immediately adjacent to, the cleavage site. In some embodiments, the cleavage site specifically occurs at the site bound by nucleotides 10 and 11 of the antisense strand, and the cleavage region comprises nucleotides 11, 12 and 13.

[0209] As used herein, and unless otherwise indicated, the term “complementary,” when used to describe a first nucleotide sequence in relation to a second nucleotide sequence, refers to the ability of an oligonucleotide or polynucleotide comprising the first nucleotide sequence to hybridize and form a duplex structure under certain conditions with an oligonucleotide or polynucleotide comprising the second nucleotide sequence, as will be understood by the skilled person. Such conditions can, for example, be stringent conditions, where stringent conditions can include: 400 mM NaCl, 40 mM PIPES pH 6.4, 1 mM EDTA, 50° C. or 70° C. for 12-16 hours followed by washing (see, e.g., “Molecular Cloning: A Laboratory Manual, Sambrook, et al. (1989) Cold Spring Harbor Laboratory Press). Other conditions, such as physiologically relevant conditions as can be encountered inside an organism, can apply. The skilled person will be able to determine the set of conditions most appropriate for a test of complementarity of two sequences in accordance with the ultimate application of the hybridized nucleotides.

[0210] Complementary sequences within an iRNA, e.g., within a dsRNA as described herein, include base-pairing of the oligonucleotide or polynucleotide comprising a first nucleotide sequence to an oligonucleotide or polynucleotide comprising a second nucleotide sequence over the entire length of one or both nucleotide sequences. Such sequences can be referred to as “fully complementary” with respect to each other herein. However, where a first sequence is referred to as “substantially complementary” with respect to a second sequence herein, the two sequences can be fully complementary, or they can form one or more, but generally not more than 5, 4, 3 or 2 mismatched base pairs upon hybridization for a duplex up to 30 base pairs, while retaining the ability to hybridize under the conditions most relevant to their ultimate application, e.g., inhibition of gene expression via a RISC pathway. However, where two oligonucleotides are designed to form, upon hybridization, one or more single stranded overhangs, such overhangs shall not be regarded as mismatches with regard to the determination of complementarity. For example, a dsRNA comprising one oligonucleotide 21 nucleotides in length and another oligonucleotide 23 nucleotides in length, wherein the longer oligonucleotide comprises a sequence of 21 nucleotides that is fully complementary to the shorter oligonucleotide, can yet be referred to as “fully complementary” for the purposes described herein.

[0211] “Complementary” sequences, as used herein, can also include, or be formed entirely from, non-Watson-Crick base pairs and/or base pairs formed from non-natural and modified nucleotides, in so far as the above requirements with respect to their ability to hybridize are fulfilled. Such non-Watson-Crick base pairs include, but are not limited to, G:U Wobble or Hoogstein base pairing.

[0212] The terms “complementary,” “fully complementary” and “substantially complementary” herein can be used with respect to the base matching between the sense strand and the antisense strand of a dsRNA, or between the antisense strand of an iRNA agent and a target sequence, as will be understood from the context of their use.

[0213] As used herein, a polynucleotide that is “substantially complementary to at least part of” a messenger RNA (mRNA) refers to a polynucleotide that is substantially complementary to a contiguous portion of the mRNA of interest (e.g., an mRNA encoding LDHA or an mRNA encoding HAO1). For example, a polynucleotide is complementary to at least a part of an LDHA mRNA if the sequence is substantially complementary to a non-interrupted portion of an mRNA encoding LDHA.

[0214] Accordingly, in some embodiments, the antisense strand polynucleotides disclosed herein are fully complementary to the target LDHA sequence. In other embodiments, the antisense strand polynucleotides disclosed herein are substantially complementary to the target LDHA sequence and comprise a contiguous nucleotide sequence which is at least about 80% complementary over its entire length to the equivalent region of the nucleotide sequence of SEQ ID NO:1, or a fragment of SEQ ID NO:1, such as about 85%, about 86%, about 87%, about 88%, about 89%, about 90%, about % 91%, about 92%, about 93%, about 94%, about 95%, about 96%, about 97%, about 98%, or about 99% complementary.

[0215] In one embodiment, an RNAi agent of the invention includes a sense strand that is substantially complementary to an antisense polynucleotide which, in turn, is complementary to a target LDHA sequence, and wherein the sense strand polynucleotide comprises a contiguous nucleotide sequence which is at least about 80% complementary over its entire length to the equivalent region of the nucleotide sequence of SEQ ID NO:2, or a fragment of any one of SEQ ID NO:2, such as about 85%, about 86%, about 87%, about 88%, about 89%, about 90%, about 91%, about 92%, about 93%, about 94%, about 95%, about 96%, about 97%, about 98%, or about 99% complementary.

[0216] In some embodiments, an iRNA of the invention includes an antisense strand that is substantially complementary to the target LDHA sequence and comprises a contiguous nucleotide sequence which is at least about 80% complementary over its entire length to the equivalent region of the nucleotide sequence of any one of the sense strands in any one of Tables 2-5, or a fragment of any one of the sense strands in any one of Tables 2-5, such as about 85%, 86%, 87%, 88%, 89%, 90%, 91%, 92%, 93%, 94%, 95%, 96%, 97%, 98%, or 99% complementary, or 100% complementary.

[0217] Accordingly, in some embodiments, the antisense strand polynucleotides disclosed herein are fully complementary to the target HAO1 sequence. In other embodiments, the antisense strand polynucleotides disclosed herein are substantially complementary to the target HAO1 sequence and comprise a contiguous nucleotide sequence which is at least about 80% complementary over its entire length to the equivalent region of the nucleotide sequence of SEQ ID NO:21, or a fragment of SEQ ID NO:21, such as about 85%, about 86%, about 87%, about 88%, about 89%, about 90%, about % 91%, about 92%, about 93%, about 94%, about 95%, about 96%, about 97%, about 98%, or about 99% complementary.

[0218] In one embodiment, an RNAi agent of the invention includes a sense strand that is substantially complementary to an antisense polynucleotide which, in turn, is complementary to a target HAO1 sequence, and wherein the sense strand polynucleotide comprises a contiguous nucleotide sequence which is at least about 80% complementary over its entire length to the equivalent region of the nucleotide sequence of SEQ ID NO:22, or a fragment of any one of SEQ ID NO:22, such as about 85%, about 86%, about 87%, about 88%, about 89%, about 90%, about % 91%, about 92%, about 93%, about 94%, about 95%, about 96%, about 97%, about 98%, or about 99% complementary.

[0219] In some embodiments, an iRNA of the invention includes an antisense strand that is substantially complementary to the target HAO1 sequence and comprises a contiguous nucleotide sequence which is at least about 80% complementary over its entire length to the equivalent region of the nucleotide sequence of any one of the sense strands in any one of Tables 7-14, or a fragment of any one of the sense strands in any one of Tables 7-14, such as about about 85%, 86%, 87%, 88%, 89%, 90%, 91%, 92%, 93%, 94%, 95%, 96%, 97%, 98%, or 99% complementary, or 100% complementary.

[0220] The term “inhibiting,” as used herein, is used interchangeably with “reducing,” “silencing,” “downregulating,” “suppressing” and other similar terms, and includes any level of inhibition.

[0221] The phrase “inhibiting expression of an LDHA gene,” as used herein, includes inhibition of expression of any LDHA gene (such as, e.g., a mouse LDHA gene, a rat LDHA gene, a monkey LDHA gene, or a human LDHA gene) as well as variants or mutants of an LDHA gene that encode an LDHA protein.

[0222] “Inhibiting expression of an LDHA gene” includes any level of inhibition of an LDHA gene, e.g., at least partial suppression of the expression of an LDHA gene, such as an inhibition by at least about 20%. In certain embodiments, inhibition is by at least about 25%, at least about 30%, at least about 35%, at least about 40%, at least about 45%, at least about 50%, at least about 55%, at least about 60%, at least about 65%, at least about 70%, at least about 75%, at least about 80%, at least about 85%, at least about 90%, at least about 91%, at least about 92%, at least about 93%, at least about 94%, at least about 95%, at least about 96%, at least about 97%, at least about 98%, or at least about 99%.

[0223] The phrase “inhibiting expression of an HAO1 gene,” as used herein, includes inhibition of expression of any HAO1 gene (such as, e.g., a mouse HAO1 gene, a rat HAO1 gene, a monkey HAO1 gene, or a human HAO1 gene) as well as variants or mutants of an HAO1 gene that encode an HAO1 protein.

[0224] “Inhibiting expression of an HAO1 gene” includes any level of inhibition of an HAO1 gene, e.g., at least partial suppression of the expression of an HAO1 gene, such as an inhibition by at least about 20%. In certain embodiments, inhibition is by at least about 25%, at least about 30%, at least about 35%, at least about 40%, at least about 45%, at least about 50%, at least about 55%, at least about 60%, at least about 65%, at least about 70%, at least about 75%, at least about 80%, at least about 85%, at least about 90%, at least about 91%, at least about 92%, at least about 93%, at least about 94%, at least about 95%, at least about 96%, at least about 97%, at least about 98%, or at least about 99%.

[0225] In embodiments in which a first dsRNA agent targeting LDHA and a second dsRNA agent targeting HAO1 are covalently attached, the inhibition of expression of LDHA may be the same or different than the inhibition of HAO1 expression.

[0226] The expression of an LDHA gene and/or an HAO1 gene may be assessed based on the level of any variable associated with LDHA gene expression and/or HAO1 gene expression, e.g., LDHA and/or HAO1 mRNA level or LDHA and/or HAO1 protein level. The expression of an LDHA gene and/or an HAO1 gene may also be assessed indirectly based on the levels of oxalate or glycolate in a urine, a plasma, or a tissue sample, or the enzymatic activity of LDHA in a tissue sample, such as a liver sample, a skeletal muscle sample, and/or a heart sample. Inhibition may be assessed by a decrease in an absolute or relative level of one or more of these variables compared with a control level. The control level may be any type of control level that is utilized in the art, e.g., a pre-dose baseline level, or a level determined from a similar subject, cell, or sample that is untreated or treated with a control (such as, e.g., buffer only control or inactive agent control).

[0227] In one embodiment, at least partial suppression of the expression of an LDHA gene, is assessed by a reduction of the amount of LDHA mRNA which can be isolated from, or detected, in a first cell or group of cells in which an LDHA gene is transcribed and which has or have been treated such that the expression of an LDHA gene is inhibited, as compared to a second cell or group of cells substantially identical to the first cell or group of cells but which has or have not been so treated (control cells).

[0228] In one embodiment, at least partial suppression of the expression of an HAO1 gene, is assessed by a reduction of the amount of HAO1 mRNA which can be isolated from or detected in a first cell or group of cells in which an HAO1 gene is transcribed and which has or have been treated such that the expression of an HAO1 gene is inhibited, as compared to a second cell or group of cells substantially identical to the first cell or group of cells but which has or have not been so treated (control cells).

[0229] In one embodiment, at least partial suppression of the expression of an LDHA gene and an HAO1 gene, is assessed by a reduction of the amount of LDHA mRNA and HAO1 mRNA which can be isolated from or detected in a first cell or group of cells in which an LDHA gene and an HAO1 gene are transcribed and which has or have been treated such that the expression of an LDHA gene and an HAO1 gene is inhibited, as compared to a second cell or group of cells substantially identical to the first cell or group of cells but which has or have not been so treated (control cells).

[0230] The degree of inhibition may be expressed in terms of:

$$\frac{( mRNA in control cells ) - ( mRNA in treated cells )}{( mRNA in control cells )} \cdot 100 \%$$

[0231] The phrase “contacting a cell with an RNAi agent,” such as a dsRNA, as used herein, includes contacting a cell by any possible means. Contacting a cell with an RNAi agent includes contacting a cell in vitro with the iRNA or contacting a cell in vivo with the iRNA. The contacting may be done directly or indirectly. Thus, for example, the RNAi agent may be put into physical contact with the cell by the individual performing the method, or alternatively, the RNAi agent may be put into a situation that will permit or cause it to subsequently come into contact with the cell.

[0232] In the methods of the invention in which a first dsRNA agent targeting LDHA and a second dsRNA agent targeting HAO1 are covalently attached (i.e., a dual targetingRNAi agent), contacting a cell may include contacting the cell with the first agent at the same time or at a different time than contacting the cell with the second agent.

[0233] Contacting a cell in vitro may be done, for example, by incubating the cell with the RNAi agent. Contacting a cell in vivo may be done, for example, by injecting the RNAi agent into or near the tissue where the cell is located, or by injecting the RNAi agent into another area, e.g., the bloodstream or the subcutaneous space, such that the agent will subsequently reach the tissue where the cell to be contacted is located. For example, the RNAi agent may contain and/or be coupled to a ligand, e.g., GalNAc3, that directs the RNAi agent to a site of interest, e.g., the liver. Combinations of in vitro and in vivo methods of contacting are also possible. For example, a cell may also be contacted in vitro with an RNAi agent and subsequently transplanted into a subject.

[0234] In one embodiment, contacting a cell with an iRNA includes “introducing” or “delivering the iRNA into the cell” by facilitating or effecting uptake or absorption into the cell. Absorption or uptake of an iRNA can occur through unaided diffusive or active cellular processes, or by auxiliary agents or devices. Introducing an iRNA into a cell may be in vitro and/or in vivo. For example, for in vivo introduction, iRNA can be injected into a tissue site or administered systemically. In vivo delivery can also be done by a beta-glucan delivery system, such as those described in U.S. Pat. Nos. 5,032,401 and 5,607,677, and U.S. Publication No. 2005/0281781, the entire contents of which are hereby incorporated herein by reference. In vitro introduction into a cell includes methods known in the art such as electroporation and lipofection. Further approaches are described herein below and/or are known in the art.

[0235] The term “lipid nanoparticle” or “LNP” is a vesicle comprising a lipid layer encapsulating a pharmaceutically active molecule, such as a nucleic acid molecule, e.g., an iRNA or a plasmid from which an iRNA is transcribed. LNPs are described in, for example, U.S. Pat. Nos. 6,858,225, 6,815,432, 8,158,601, and 8,058,069, the entire contents of which are hereby incorporated herein by reference.

[0236] As used herein, a “subject” is an animal, such as a mammal, including a primate (such as a human, a non-human primate, e.g., a monkey, and a chimpanzee), a non-primate (such as a cow, a pig, a camel, a llama, a horse, a goat, a rabbit, a sheep, a hamster, a guinea pig, a cat, a dog, a rat, a mouse, a horse, and a whale), or a bird (e.g., a duck or a goose).

[0237] In an embodiment, the subject is a human, such as a human being treated or assessed for a disease, disorder or condition that would benefit from reduction in LDHA expression; a human at risk for a disease, disorder or condition that would benefit from reduction in LDHA expression; a human having a disease, disorder or condition that would benefit from reduction in LDHA expression; and/or human being treated for a disease, disorder or condition that would benefit from reduction in LDHA expression as described herein.

[0238] It is to be understood that a human being treated or assessed for a disease, disorder or condition that would benefit from reduction in LDHA expression includes a a human being treated or assessed for a disease, disorder or condition that would benefit from reduction in LDHA and HAO1 expression; that a human at risk for a disease, disorder or condition that would benefit from reduction in LDHA expression includes a human at risk for a disease, disorder or condition that would benefit from reduction in LDHA and HAO1 expression; that a human having a disease, disorder or condition that would benefit from reduction in LDHA expression includes a human at risk for a disease, disorder or condition that would benefit from reduction in LDHA and HAO1 expression; and that a human being treated for a disease, disorder or condition that would benefit from reduction in LDHA expression includes a human being treated for a disease, disorder or condition that would benefit from reduction in LDHA and HAO1 expression as described herein.

[0239] As used herein, the terms “treating” or “treatment” refer to a beneficial or desired result, such as lowering urinary excretion levels of oxalate in a subject. The terms “treating” or “treatment” also include, but are not limited to, alleviation or amelioration of one or more symptoms of an oxalate pathway-associated disease disorder, or condition, such as, e.g., slowing the course of the disease; reducing the severity of later-developing disease; reduction in edema of the extremities, face, larynx, upper respiratory tract, abdomen, trunk, and/or genitals, prodrome, laryngeal swelling, nonpruritic rash, nausea, vomiting, and/or abdominal pain; decreasing progression of liver disease to cirrhosis or hepatocellular carcinoma; stabilizing current stone burden; decreasing recurrence of stones formed; and/or preventing further oxalate tissue deposition. “Treatment” can also mean prolonging survival as compared to expected survival in the absence of treatment.

[0240] The term “lower” in the context of a disease marker or symptom refers to a statistically significant decrease in such level. The decrease can be, for example, at least 10%, at least 15%, at least 20%, at least 25%, at least 30%, at least 35%, at least 40%, at least 45%, at least 50%, at least 55%, at least 60%, at least 65%, at least 70%, at least 75%, at least 80%, at least 85%, at least 90%, at least 95%, or more and is preferably down to a level accepted as within the range of normal for an individual without such disorder.

[0241] As used herein, “prevention” or “preventing,” when used in reference to a disease, disorder or condition thereof, that would benefit from a reduction in expression of an LDHA gene, refers to a reduction in the likelihood that a subject will develop a symptom associated with such disease, disorder, or condition, e.g., stone formation. The likelihood of, e.g., stone formation, is reduced, for example, when an individual having one or more risk factors for stone formation either fails to develop stones or develops stones with less severity relative to a population having the same risk factors and not receiving treatment as described herein. The failure to develop a disease, disorder or condition, or the reduction in the development of a symptom associated with such a disease, disorder or condition (e.g., by at least about 10% on a clinically accepted scale for that disease or disorder), or the exhibition of delayed symptoms delayed (e.g., by days, weeks, months or years) is considered effective prevention.

[0242] There are numerous disorders that would benefit from reduction in expression of an LDHA gene, such as an oxalate pathway-associated disease disorder, or condition.

[0243] As used herein, the term “oxalate pathway-associated disease, disorder, or condition” refers to a disease, disorder or condition thereof, in which lactate dehydrogenase knockdown is known or predicted to be therapeutic or otherwise advantageous, e.g., associated with or caused by a disturbance in lactate dehydrogenase production and/or urinary oxalate production.

[0244] In one embodiment, an “oxalate pathway-associated disease, disorder, or condition” is a “lactate dehydrogenase-associated disease, disorder, or condition.” As used herein, a “lactate dehydrogenase-associated disease, disorder, or condition” includes any disease, disorder or condition that would benefit from a decrease in lactate dehydrogenase gene expression, replication, or protein activity. Exemplary lactate dehydrogenase-associated disease, disorders, and conditions include, for example, fatty liver (steatosis), nonalcoholic steatohepatitis (NASH), cirrhosis of the liver, accumulation of fat in the liver, inflammation of the liver, hepatocellular necrosis, liver fibrosis, obesity, nonalcoholic fatty liver disease (NAFLD), and cancer, e.g., hepatocellular carcinoma.

[0245] In another embodiment, an “oxalate pathway-associated disease, disorder, or condition” is “an oxalate-associated disease, disorder, or condition.” As used herein, “an oxalate-associated disease, disorder, or condition” includes any disease, disorder or condition that would benefit from a decrease in lactate dehydrogenase gene expression, replication, or protein activity. The term “oxalate-associated disease, disorder, or condition” refers to inherited disorders, or induced or acquired disorders. Exemplary “oxalate-associated diseases, disorders, or conditions” include “kidney stone formation diseases, disorders, and conditions” and “calcium oxalate tissue deposition diseases, disorders, and conditions.”

[0246] Exemplary kidney stone formation diseases, disorders, and conditions include “calcium oxalate stone formation diseases, disorders, and conditions” and “non-calcium oxalate stone formation diseases, disorders, and conditions.”

[0247] Non-limiting examples of “calcium oxalate stone formation diseases, disorders, and conditions” include a hyperoxaluria (e.g., a. primary hyperoxaluria, such as primary hyperoxaluria 1 (PH1), primary hyperoxaluria 2 (PH2), primary hyperoxaluria 3 (PH3) and nonPH1/PH2/PH3; enteric hyperoxaluria; dietary hyperoxaluria; and idiopathic hyperoxaluria) and a non-hyperoxaluria disorder (e.g., a hypercalciuria, such as primary hyperparathyroid, Dent's disease, absorptive hypercalciuria, and renal hypercalciuria; and hypocitraturia).

[0248] Non-limiting examples of “non-calcium oxalate stone formation diseases, disorders, and conditions” include subjects having kidney stones that are comprised of less than about 50%, less than about 45%, less than about 40%, less than about 35%, less than about 30%, less than about 25% less than about 20%, less than about 15%, or less than about 10% oxalate, and more than about 50% non-oxalate, e.g. calcium phosphate, uric acid, struvite, cystinuria, or other component.

[0249] Exemplary “calcium oxalate tissue deposition diseases, disorders, and conditions” include systemic calcium oxalate tissue deposition diseases, disorders, and conditions, such as calcium oxalate tissue deposition due to end-stage renal disease, sarcoidosis, or arthritis; and tissue specific calcium oxalate deposition diseases, disorders, and conditions, e.g., in the kidney (e.g., due to nephrocalcinosis, or medullary sponge kidney), in the thyroid, in the breast, in the bone, in the heart, in the vasculature, or in any soft tissue due to an organ transplant, such as a kidney transplant.

[0250] “Therapeutically effective amount,” as used herein, is intended to include the amount of an RNAi agent that, when administered to a subject having an oxalate pathway-associated disease, disorder, or condition, is sufficient to effect treatment of the disease (e.g., by diminishing, ameliorating or maintaining the existing disease or one or more symptoms of disease). The “therapeutically effective amount” may vary depending on the RNAi agent, how the agent is administered, the disease and its severity and the history, age, weight, family history, genetic makeup, the types of preceding or concomitant treatments, if any, and other individual characteristics of the subject to be treated.

[0251] “Prophylactically effective amount,” as used herein, is intended to include the amount of an iRNA that, when administered to a subject having an oxalate pathway-associated disease, disorder, or condition, is sufficient to prevent or ameliorate the disease or one or more symptoms of the disease. Ameliorating the disease includes slowing the course of the disease or reducing the severity of later-developing disease. The “prophylactically effective amount” may vary depending on the iRNA, how the agent is administered, the degree of risk of disease, and the history, age, weight, family history, genetic makeup, the types of preceding or concomitant treatments, if any, and other individual characteristics of the patient to be treated.

[0252] A “therapeutically-effective amount” or “prophylacticaly effective amount” also includes an amount of an RNAi agent that produces some desired local or systemic effect at a reasonable benefit/risk ratio applicable to any treatment. iRNA employed in the methods of the present invention may be administered in a sufficient amount to produce a reasonable benefit/risk ratio applicable to such treatment.

[0253] In the methods of the invention which include administering to a subject a pharmaceutical composition comprising a first dsRNA agent targeting LDHA and a second dsRNA agent targeting HAO1, the therapeutically effective amountof the first dsRNA agent may be the same or different than the therapeutically effective amount of the second dsRNA agent. Similarly, in the methods of the invention which include administering to a subject a pharmaceutical composition comprising a first dsRNA agent targeting LDHA and a second dsRNA agent targeting HAO1, the prophylacticly effective amountof the first dsRNA agent may be the same or different than the prophylacticaly effective amount of the second dsRNA agent.

[0254] The phrase “pharmaceutically acceptable” is employed herein to refer to those compounds, materials, compositions, and/or dosage forms which are, within the scope of sound medical judgment, suitable for use in contact with the tissues of human subjects and animal subjects without excessive toxicity, irritation, allergic response, or other problem or complication, commensurate with a reasonable benefit/risk ratio.

[0255] The phrase “pharmaceutically-acceptable carrier” as used herein means a pharmaceutically-acceptable material, composition or vehicle, such as a liquid or solid filler, diluent, excipient, manufacturing aid (e.g., lubricant, talc magnesium, calcium or zinc stearate, or steric acid), or solvent encapsulating material, involved in carrying or transporting the subject compound from one organ, or portion of the body, to another organ, or portion of the body. Each carrier must be “acceptable” in the sense of being compatible with the other ingredients of the formulation and not injurious to the subject being treated. Some examples of materials which can serve as pharmaceutically-acceptable carriers include: (1) sugars, such as lactose, glucose and sucrose; (2) starches, such as corn starch and potato starch; (3) cellulose, and its derivatives, such as sodium carboxymethyl cellulose, ethyl cellulose and cellulose acetate; (4) powdered tragacanth; (5) malt; (6) gelatin; (7) lubricating agents, such as magnesium state, sodium lauryl sulfate and talc; (8) excipients, such as cocoa butter and suppository waxes; (9) oils, such as peanut oil, cottonseed oil, safflower oil, sesame oil, olive oil, corn oil and soybean oil; (10) glycols, such as propylene glycol; (11) polyols, such as glycerin, sorbitol, mannitol and polyethylene glycol; (12) esters, such as ethyl oleate and ethyl laurate; (13) agar; (14) buffering agents, such as magnesium hydroxide and aluminum hydroxide; (15) alginic acid; (16) pyrogen-free water; (17) isotonic saline; (18) Ringer's solution; (19) ethyl alcohol; (20) pH buffered solutions; (21) polyesters, polycarbonates and/or polyanhydrides; (22) bulking agents, such as polypeptides and amino acids (23) serum component, such as serum albumin, HDL and LDL; and (22) other non-toxic compatible substances employed in pharmaceutical formulations.

[0256] The term “sample,” as used herein, includes a collection of similar fluids, cells, or tissues isolated from a subject, as well as fluids, cells, or tissues present within a subject. Examples of biological fluids include blood, serum and serosal fluids, plasma, cerebrospinal fluid, ocular fluids, lymph, urine, saliva, and the like. Tissue samples may include samples from tissues, organs or localized regions. For example, samples may be derived from particular organs, parts of organs, or fluids or cells within those organs. In certain embodiments, samples may be derived from the liver (e.g., whole liver or certain segments of liver or certain types of cells in the liver, such as, e.g., hepatocytes). In some embodiments, a “sample derived from a subject” refers to blood or plasma drawn from the subject.

### II. iRNAs of the Invention

[0257] Described herein are iRNAs which inhibit the expression of a target gene. In one embodiment, the iRNAs inhibit the expression of an LDHA gene. In one embodiment, the iRNA agent includes double stranded ribonucleic acid (dsRNA) molecules for inhibiting the expression of an LDHA gene in a cell, such as a liver cell, such as a liver cell within a subject, e.g., a mammal, such as a human having an oxalate pathway-associated disease, disorder, or condition, e.g., a stone formation disease, disorder, or condition. In another embodiment, the iRNAs inhibit the expression of an HAO1 gene. In one embodiment, the iRNA agent includes double stranded ribonucleic acid (dsRNA) molecules for inhibiting the expression of an HAO1 gene in a cell, such as a liver cell, such as a liver cell within a subject, e.g., a mammal, such as a human having a an oxalate pathway-associated disease, disorder, or condition, e.g., an oxalate-associated disease, disorder, or condition, e.g., a kidney stone formation disease, disorder, or condition or a calcium oxalate tissue deposition disease, disorder, or condition; or an LDH-associated disease, disorder, or condition.

[0258] Also provided herein are iRNAs which inhibit the expression of two target genes, referred to as dual targeting RNAi agents. In one embodiment, the dual targeting RNAi agent includes a first double stranded ribonucleic acid (dsRNA) agent for inhibiting the expression of an LDHA gene in a cell (such as a liver cell, e.g., a liver cell within a subject) covalently attached to a second double stranded ribonucleic acid (dsRNA) agent for inhibiting the expression of an HAO1 gene in a cell (such as a liver cell, e.g., a liver cell within a subject), such as a cell within a subject, e.g., a mammal, such as a human having an oxalate pathway-associated disease, disorder, or condition, e.g., an oxalate-associated disease, disorder, or condition, e.g., a kidney stone formation disease, disorder, or condition or a calcium oxalate tissue deposition disease, disorder, or condition; or an LDH-associated disease, disorder, or condition.

[0259] The dsRNA includes an antisense strand having a region of complementarity which is complementary to at least a part of an mRNA formed in the expression of an LDHA gene or an HAO1 gene, The region of complementarity is about 30 nucleotides or less in length (e.g., about 30, 29, 28, 27, 26, 25, 24, 23, 22, 21, 20, 19, or 18 nucleotides or less in length). Upon contact with a cell expressing the target gene, the iRNA inhibits the expression of the target gene (e.g., a human, a primate, a non-primate, or a bird target gene) by at least about 10% as assayed by, for example, a PCR or branched DNA (bDNA)-based method, or by a protein-based method, such as by immunofluorescence analysis, using, for example, Western Blotting or flowcytometric techniques.

[0260] A dsRNA includes two RNA strands that are complementary and hybridize to form a duplex structure under conditions in which the dsRNA will be used. One strand of a dsRNA (the antisense strand) includes a region of complementarity that is substantially complementary, and generally fully complementary, to a target sequence. The target sequence can be derived from the sequence of an mRNA formed during the expression of an LDHA gene or an HAO1 gene. The other strand (the sense strand) includes a region that is complementary to the antisense strand, such that the two strands hybridize and form a duplex structure when combined under suitable conditions. As described elsewhere herein and as known in the art, the complementary sequences of a dsRNA can also be contained as self-complementary regions of a single nucleic acid molecule, as opposed to being on separate oligonucleotides.

[0261] Generally, the duplex structure is between 15 and 30 base pairs in length, e.g., between, 15-29, 15-28, 15-27, 15-26, 15-25, 15-24, 15-23, 15-22, 15-21, 15-20, 15-19, 15-18, 15-17, 18-30, 18-29, 18-28, 18-27, 18-26, 18-25, 18-24, 18-23, 18-22, 18-21, 18-20, 19-30, 19-29, 19-28, 19-27, 19-26, 19-25, 19-24, 19-23, 19-22, 19-21, 19-20, 20-30, 20-29, 20-28, 20-27, 20-26, 20-25, 20-24,20-23, 20-22, 20-21, 21-30, 21-29, 21-28, 21-27, 21-26, 21-25, 21-24, 21-23, or 21-22 base pairs in length. Ranges and lengths intermediate to the above recited ranges and lengths are also contemplated to be part of the invention.

[0262] Similarly, the region of complementarity to the target sequence is between 15 and 30 nucleotides in length, e.g., between 15-29, 15-28, 15-27, 15-26, 15-25, 15-24, 15-23, 15-22, 15-21, 15-20, 15-19, 15-18, 15-17, 18-30, 18-29, 18-28, 18-27, 18-26, 18-25, 18-24, 18-23, 18-22, 18-21, 18-20, 19-30, 19-29, 19-28, 19-27, 19-26, 19-25, 19-24, 19-23, 19-22, 19-21, 19-20, 20-30, 20-29, 20-28, 20-27, 20-26, 20-25, 20-24,20-23, 20-22, 20-21, 21-30, 21-29, 21-28, 21-27, 21-26, 21-25, 21-24, 21-23, or 21-22 nucleotides in length. Ranges and lengths intermediate to the above recited ranges and lengths are also contemplated to be part of the invention.

[0263] In some embodiments, the dsRNA is between about 15 and about 23 nucleotides in length, or between about 25 and about 30 nucleotides in length. In general, the dsRNA is long enough to serve as a substrate for the Dicer enzyme. For example, it is well known in the art that dsRNAs longer than about 21-23 nucleotides can serve as substrates for Dicer. As the ordinarily skilled person will also recognize, the region of an RNA targeted for cleavage will most often be part of a larger RNA molecule, often an mRNA molecule. Where relevant, a “part” of an mRNA target is a contiguous sequence of an mRNA target of sufficient length to allow it to be a substrate for RNAi-directed cleavage (i.e., cleavage through a RISC pathway).

[0264] One of skill in the art will also recognize that the duplex region is a primary functional portion of a dsRNA, e.g., a duplex region of about 9 to 36 base pairs, e.g., about 10-36, 11-36, 12-36, 13-36, 14-36, 15-36, 9-35, 10-35, 11-35, 12-35, 13-35, 14-35, 15-35, 9-34, 10-34, 11-34, 12-34, 13-34, 14-34, 15-34, 9-33, 10-33, 11-33, 12-33, 13-33, 14-33, 15-33, 9-32, 10-32, 11-32, 12-32, 13-32, 14-32, 15-32, 9-31, 10-31, 11-31, 12-31, 13-32, 14-31, 15-31, 15-30, 15-29, 15-28, 15-27, 15-26, 15-25, 15-24, 15-23, 15-22, 15-21, 15-20, 15-19, 15-18, 15-17, 18-30, 18-29, 18-28, 18-27, 18-26, 18-25, 18-24, 18-23, 18-22, 18-21, 18-20, 19-30, 19-29, 19-28, 19-27, 19-26, 19-25, 19-24, 19-23, 19-22, 19-21, 19-20, 20-30, 20-29, 20-28, 20-27, 20-26, 20-25, 20-24, 20-23, 20-22, 20-21, 21-30, 21-29, 21-28, 21-27, 21-26, 21-25, 21-24, 21-23, or 21-22 base pairs. Thus, in one embodiment, to the extent that it becomes processed to a functional duplex, of e.g., 15-30 base pairs, that targets a desired RNA for cleavage, an RNA molecule or complex of RNA molecules having a duplex region greater than 30 base pairs is a dsRNA. Thus, an ordinarily skilled artisan will recognize that in one embodiment, a miRNA is a dsRNA. In another embodiment, a dsRNA is not a naturally occurring miRNA. In another embodiment, an iRNA agent useful to target LDHA expression or LDHA and HAO1 expression is not generated in the target cell by cleavage of a larger dsRNA.

[0265] A dsRNA as described herein can further include one or more single-stranded nucleotide overhangs e.g., 1, 2, 3, or 4 nucleotides. dsRNAs having at least one nucleotide overhang can have unexpectedly superior inhibitory properties relative to their blunt-ended counterparts. A nucleotide overhang can comprise or consist of a nucleotide/nucleoside analog, including a deoxynucleotide/nucleoside. The overhang(s) can be on the sense strand, the antisense strand or any combination thereof. Furthermore, the nucleotide(s) of an overhang can be present on the 5′-end, 3′-end or both ends of either an antisense or sense strand of a dsRNA.

[0266] A dsRNA can be synthesized by standard methods known in the art as further discussed below, e.g., by use of an automated DNA synthesizer, such as are commercially available from, for example, Biosearch, Applied Biosystems, Inc.

[0267] iRNA compounds of the invention may be prepared using a two-step procedure. First, the individual strands of the double-stranded RNA molecule are prepared separately. Then, the component strands are annealed. The individual strands of the siRNA compound can be prepared using solution-phase or solid-phase organic synthesis or both. Organic synthesis offers the advantage that the oligonucleotide strands comprising unnatural or modified nucleotides can be easily prepared. Single-stranded oligonucleotides of the invention can be prepared using solution-phase or solid-phase organic synthesis or both.

[0268] In one aspect, a dsRNA of the invention includes at least two nucleotide sequences, a sense sequence and an anti-sense sequence. The sense strand sequence is selected from the group of sequences provided in any one of Tables 2-5 and the corresponding nucleotide sequence of the antisense strand of the sense strand is selected from the group of sequences of any one of Tables 2-5. In this aspect, one of the two sequences is complementary to the other of the two sequences, with one of the sequences being substantially complementary to a sequence of an mRNA generated in the expression of an LDHA gene. As such, in this aspect, a dsRNA will include two oligonucleotides, where one oligonucleotide is described as the sense strand (passenger strand) in any one of Tables 2-5 and the second oligonucleotide is described as the corresponding antisense strand (guide strand) of the sense strand in any one of Tables 2-5. In one embodiment, the substantially complementary sequences of the dsRNA are contained on separate oligonucleotides. In another embodiment, the substantially complementary sequences of the dsRNA are contained on a single oligonucleotide.

[0269] In another aspect, a dsRNA of the invention targets an HAO1 gene and includes at least two nucleotide sequences, a sense sequence and an anti-sense sequence. The sense strand sequence is selected from the group of sequences provided in any one of Tables 7-14 and the corresponding nucleotide sequence of the antisense strand of the sense strand is selected from the group of sequences of any one of Tables 7-14. In this aspect, one of the two sequences is complementary to the other of the two sequences, with one of the sequences being substantially complementary to a sequence of an mRNA generated in the expression of an HAO1 gene. As such, in this aspect, a dsRNA will include two oligonucleotides, where one oligonucleotide is described as the sense strand (passenger strand) in any one of Tables 7-14 and the second oligonucleotide is described as the corresponding antisense strand (guide strand) of the sense strand in any one of Tables 7-14. In one embodiment, the substantially complementary sequences of the dsRNA are contained on separate oligonucleotides. In another embodiment, the substantially complementary sequences of the dsRNA are contained on a single oligonucleotide.

[0270] It will be understood that, although the sequences in Tables 2-5 and 7-14 are described as modified, unmodified, unconjugated. and/or conjugated sequences, the RNA of the iRNA of the invention e.g., a dsRNA of the invention, may comprise any one of the sequences set forth in any one of Table 2-5 and 7-14 that is un-modified, un-conjugated, and/or modified and/or conjugated differently than described therein.

[0271] The skilled person is well aware that dsRNAs having a duplex structure of between about 20 and 23 base pairs, e.g., 21, base pairs have been hailed as particularly effective in inducing RNA interference (Elbashir et al., (2001) EMBO J., 20:6877-6888). However, others have found that shorter or longer RNA duplex structures can also be effective (Chu and Rana (2007) RNA 14:1714-1719; Kim et al. (2005) Nat Biotech 23:222-226). In the embodiments described above, by virtue of the nature of the oligonucleotide sequences provided herein, dsRNAs described herein can include at least one strand of a length of minimally 21 nucleotides. It can be reasonably expected that shorter duplexes minus only a few nucleotides on one or both ends can be similarly effective as compared to the dsRNAs described above. Hence, dsRNAs having a sequence of at least 15, 16, 17, 18, 19, 20, or more contiguous nucleotides derived from one of the sequences provided herein, and differing in their ability to inhibit the expression of an LDHA gene or an HAO1 gene by not more than about 5, 10, 15, 20, 25, or 30% inhibition from a dsRNA comprising the full sequence, are contemplated to be within the scope of the present invention.

[0272] In addition, the RNAs described in any one of Tables 2-5 identify a site(s) in an LDHA transcript that is susceptible to RISC-mediated cleavage and those RNAs described in any one of Tables 7-14 identify a site(s) in an HAO1 transcript that is susceptible to RISC-mediated cleavage. As such, the present invention further features iRNAs that target within this site(s). As used herein, an iRNA is said to target within a particular site of an RNA transcript if the iRNA promotes cleavage of the transcript anywhere within that particular site. Such an iRNA will generally include at least about 15 contiguous nucleotides from one of the sequences provided herein coupled to additional nucleotide sequences taken from the region contiguous to the selected sequence in the gene.

[0273] While a target sequence is generally about 15-30 nucleotides in length, there is wide variation in the suitability of particular sequences in this range for directing cleavage of any given target RNA. Various software packages and the guidelines set out herein provide guidance for the identification of optimal target sequences for any given gene target, but an empirical approach can also be taken in which a “window” or “mask” of a given size (as a non-limiting example, 21 nucleotides) is literally or figuratively (including, e.g., in silico) placed on the target RNA sequence to identify sequences in the size range that can serve as target sequences. By moving the sequence “window” progressively one nucleotide upstream or downstream of an initial target sequence location, the next potential target sequence can be identified, until the complete set of possible sequences is identified for any given target size selected. This process, coupled with systematic synthesis and testing of the identified sequences (using assays as described herein or as known in the art) to identify those sequences that perform optimally can identify those RNA sequences that, when targeted with an iRNA agent, mediate the best inhibition of target gene expression. Thus, while the sequences identified herein represent effective target sequences, it is contemplated that further optimization of inhibition efficiency can be achieved by progressively “walking the window” one nucleotide upstream or downstream of the given sequences to identify sequences with equal or better inhibition characteristics.

[0274] Further, it is contemplated that for any sequence identified herein, further optimization could be achieved by systematically either adding or removing nucleotides to generate longer or shorter sequences and testing those sequences generated by walking a window of the longer or shorter size up or down the target RNA from that point. Again, coupling this approach to generating new candidate targets with testing for effectiveness of iRNAs based on those target sequences in an inhibition assay as known in the art and/or as described herein can lead to further improvements in the efficiency of inhibition. Further still, such optimized sequences can be adjusted by, e.g., the introduction of modified nucleotides as described herein or as known in the art, addition or changes in overhang, or other modifications as known in the art and/or discussed herein to further optimize the molecule (e.g., increasing serum stability or circulating half-life, increasing thermal stability, enhancing transmembrane delivery, targeting to a particular location or cell type, increasing interaction with silencing pathway enzymes, increasing release from endosomes) as an expression inhibitor.

[0275] An iRNA agent as described herein can contain one or more mismatches to the target sequence. In one embodiment, an iRNA as described herein contains no more than 3 mismatches. If the antisense strand of the iRNA contains mismatches to a target sequence, it is preferable that the area of mismatch is not located in the center of the region of complementarity. If the antisense strand of the iRNA contains mismatches to the target sequence, it is preferable that the mismatch be restricted to be within the last 5 nucleotides from either the 5′- or 3′-end of the region of complementarity. For example, for a 23 nucleotide iRNA agent the strand which is complementary to a region of an LDHA gene or an HAO1 gene, generally does not contain any mismatch within the central 13 nucleotides. The methods described herein or methods known in the art can be used to determine whether an iRNA containing a mismatch to a target sequence is effective in inhibiting the expression of an LDHA gene and/or an HAO1 gene. Consideration of the efficacy of iRNAs with mismatches in inhibiting expression of an LDHA gene and/or an HAO1 gene is important, especially if the particular region of complementarity in an LDHA gene and/or HAO1 gene is known to have polymorphic sequence variation within the population.

[0276] The dual targeting RNAi agents of the invention, which include two dsRNA agents, are covalently attached via, e.g., a covalent linker. Covalent linkers are well known in the art and include, e.g., nucleic acid linkers, peptide linkers, carbohydrate linkers, and the like. The covalent linker can include RNA and/or DNA and/or a peptide. The linker can be single stranded, double stranded, partially single strands, or partially double stranded. Modified nucleotides or a mixture of nucleotides can also be present in a nucleic acid linker.

[0277] Suitable linkers for use in the dual targeting agent of the invention include those described in U.S. Pat. No. 9,187,746, the entire contents of which are incorporated herein by reference.

[0278] In some embodiments the linker includes a disulfide bond. The linker can be cleavable or non-cleavable.

[0279] The linker can be, e.g., dTsdTuu=(5′-2′deoxythymidyl-3′-thiophosphate-5′-2/deoxythymidyl-3′-phosphate-5′-uridyl-3′-phosphate-5′-uridyl-3′-phosphate); rUsrU (a thiophosphate linker: 5′-uridyl-3′-thiophosphate-5′-uridyl-3′-phosphate); an rUrU linker; dTsdTaa (aadTsdT, 5′-2′deoxythymidyl-3′-thiophosphate-5′-2′deoxythymidyl-3′-phosphate-5′-adenyl-3′-phosphate-5′-adenyl-3′-phosphate); dTsdT (5′-2′deoxythymidyl-3′-thiophosphate-5′-2′ deoxythymidyl-3′-phosphate); dTsdTuu=uudTsdT=5′-2′deoxythymidyl-3′-thiophosphate-5′-2′deoxythymidyl-3′-phosphate-5′-uridyl-3′-phosphate-5′-uridyl-3′-phosphate.

[0280] The linker can be a polyRNA, such as poly(5′-adenyl-3′-phosphate-AAAAAAAA) or poly(5′-cytidyl-3′-phosphate-5′-uridyl-3′-phosphate-CUCUCUCU)), e.g., Xn single stranded poly RNA linker wherein n is an integer from 2-50 inclusive, preferable 4-15 inclusive, most preferably 7-8 inclusive. Modified nucleotides or a mixture of nucleotides can also be present in said polyRNA linker. The covalent linker can be a polyDNA, such as poly(5′-2′deoxythymidyl-3′-phosphate-TTTTTTTT), e.g., wherein n is an integer from 2-50 inclusive, preferable 4-15 inclusive, most preferably 7-8 inclusive. Modified nucleotides or a mixture of nucleotides can also be present in said polyDNA linker, a single stranded polyDNA linker wherein n is an integer from 2-50 inclusive, preferable 4-inclusive, most preferably 7-8 inclusive. Modified nucleotides or a mixture of nucleotides can also be present in said polyDNA linker.

[0281] The linker can include a disulfide bond, optionally a bis-hexyl-disulfide linker. In one embodiment, the disulfide linker is

[chemical structure]

[0282] The linker can include a peptide bond, e.g., include amino acids. In one embodiment, the covalent linker is a 1-10 amino acid long linker, preferably comprising 4-5 amino acids, optionally X-Gly-Phe-Gly-Y wherein X and Y represent any amino acid.

[0283] The linker can include HEG, a hexaethylenglycol linker.

[0284] The covalent linker can attach the sense strand of the first dsRNA agent to the sense strand of the second dsRNA agent; the antisense strand of the first dsRNA agent to the antisense strand of the second dsRNA agent; the sense strand of the first dsRNA agent to the antisense strand of the second dsRNA agent; or the antisense strand of the first dsRNA agent to the sense strand of the second dsRNA agent.

[0285] In some embodiments, the covalent linker further comprises at least one ligand, described below.

### III. Modified iRNAs of the Invention

[0286] In one embodiment, the RNA of the iRNA of the invention e.g., a dsRNA, is un-modified, and does not comprise, e.g., chemical modifications and/or conjugations known in the art and described herein. In another embodiment, the RNA of an iRNA of the invention, e.g., a dsRNA, is chemically modified to enhance stability or other beneficial characteristics. In certain embodiments of the invention, substantially all of the nucleotides of an iRNA of the invention are modified. In other embodiments of the invention, all of the nucleotides of an iRNA of the invention are modified. iRNAs of the invention in which “substantially all of the nucleotides are modified” are largely but not wholly modified and can include not more than 5, 4, 3, 2, or 1 unmodified nucleotides.

[0287] In embodiments in which a first dsRNA agent targeting LDHA and a second dsRNA agent targeting HAO1 are covalently attached (i.e., a dual targeting RNAi agent), substantially all of the nucleotides of the first agent and substantially all of the nucleotides of the second agent may be independently modified; all of the nucleotides of the first agent may be modified and all of the nucleotides of the second agent may be independently modified; substantially all of the nucleotides of the first agent and all of the nucleotides of the second agent may be independently modified; or all of the nucleotides of the first agent may be modified and substantially all of the nucleotides of the second agent may be independently modified.

[0288] In some aspects of the invention, substantially all of the nucleotides of an iRNA of the invention are modified and the iRNA agents comprise no more than 10 nucleotides comprising 2′-fluoro modifications (e.g., no more than 9 2′-fluoro modifications, no more than 8 2′-fluoro modifications, no more than 7 2′-fluoro modifications, no more than 6 2′-fluoro modifications, no more than 5 2′-fluoro modifications, no more than 4 2′-fluoro modifications, no more than 5 2′-fluoro modifications, no more than 4 2′-fluoro modifications, no more than 3 2′-fluoro modifications, or no more than 2 2′-fluoro modifications). For example, in some embodiments, the sense strand comprises no more than 4 nucleotides comprising 2′-fluoro modifications (e.g., no more than 3 2′-fluoro modifications, or no more than 2 2′-fluoro modifications). In other embodiments, the antisense strand comprises no more than 6 nucleotides comprising 2′-fluoro modifications (e.g., no more than 5 2′-fluoro modifications, no more than 4 2′-fluoro modifications, no more than 4 2′-fluoro modifications, or no more than 2 2′-fluoro modifications).

[0289] In embodiments in which a first dsRNA agent targeting LDHA and a second dsRNA agent targeting HAO1 are covalently attached (i.e., a dual targeting RNAi agent), substantially all of the nucleotides of the first agent and/or substantially all of the nucleotides of the second agent may be independently modified and the first and second agents may independently comprise no more than 10 nucleotides comprising 2′-fluoro modifications.

[0290] In other aspects of the invention, all of the nucleotides of an iRNA of the invention are modified and the iRNA agents comprise no more than 10 nucleotides comprising 2′-fluoro modifications (e.g., no more than 9 2′-fluoro modifications, no more than 8 2′-fluoro modifications, no more than 7 2′-fluoro modifications, no more than 6 2′-fluoro modifications, no more than 5 2′-fluoro modifications, no more than 4 2′-fluoro modifications, no more than 5 2′-fluoro modifications, no more than 4 2′-fluoro modifications, no more than 3 2′-fluoro modifications, or no more than 2 2′-fluoro modifications).

[0291] In embodiments in which a first dsRNA agent targeting LDHA and a second dsRNA agent targeting HAO1 are covalently attached (i.e., a dual targeting RNAi agent), all of the nucleotides of the first agent and/or all of the nucleotides of the second agent may be independently modified and the first and second agents may independently comprise no more than 10 nucleotides comprising 2′-fluoro modifications.

[0292] In one embodiment, the double stranded RNAi agent of the invention further comprises a 5′-phosphate or a 5′-phosphate mimic at the 5′ nucleotide of the antisense strand. In another embodiment, the double stranded RNAi agent further comprises a 5′-phosphate mimic at the 5′ nucleotide of the antisense strand. In a specific embodiment, the 5′-phosphate mimic is a 5′-vinyl phosphate (5′-VP).

[0293] In embodiments in which a first dsRNA agent targeting LDHA and a second dsRNA agent targeting HAO1 are covalently attached (i.e., a dual targeting RNAi agent), the first agent may further comprise a 5′-phosphate or a 5′-phosphate mimic at the 5′ nucleotide of the antisense strand; the second agent may further comprise a 5′-phosphate or a 5′-phosphate mimic at the 5′ nucleotide of the antisense strand; or the first agent and the second agent may further independently comprise a 5′-phosphate or a 5′-phosphate mimic at the 5′ nucleotide of the antisense strand.

[0294] The nucleic acids featured in the invention can be synthesized and/or modified by methods well established in the art, such as those described in “Current protocols in nucleic acid chemistry,” Beaucage, S. L. et al. (Edrs.), John Wiley & Sons, Inc., New York, N.Y., USA, which is hereby incorporated herein by reference. Modifications include, for example, end modifications, e.g., 5′-end modifications (phosphorylation, conjugation, inverted linkages) or 3′-end modifications (conjugation, DNA nucleotides, inverted linkages, etc.); base modifications, e.g., replacement with stabilizing bases, destabilizing bases, or bases that base pair with an expanded repertoire of partners, removal of bases (abasic nucleotides), or conjugated bases; sugar modifications (e.g., at the 2′-position or 4′-position) or replacement of the sugar; and/or backbone modifications, including modification or replacement of the phosphodiester linkages. Specific examples of iRNA compounds useful in the embodiments described herein include, but are not limited to RNAs containing modified backbones or no natural internucleoside linkages. RNAs having modified backbones include, among others, those that do not have a phosphorus atom in the backbone. For the purposes of this specification, and as sometimes referenced in the art, modified RNAs that do not have a phosphorus atom in their internucleoside backbone can also be considered to be oligonucleosides. In some embodiments, a modified iRNA will have a phosphorus atom in its internucleoside backbone.

[0295] Modified RNA backbones include, for example, phosphorothioates, chiral phosphorothioates, phosphorodithioates, phosphotriesters, aminoalkylphosphotriesters, methyl and other alkyl phosphonates including 3′-alkylene phosphonates and chiral phosphonates, phosphinates, phosphoramidates including 3′-amino phosphoramidate and aminoalkylphosphoramidates, thionophosphoramidates, thionoalkylphosphonates, thionoalkylphosphotriesters, and boranophosphates having normal 3′-5′ linkages, 2′-5′-linked analogs of these, and those having inverted polarity wherein the adjacent pairs of nucleoside units are linked 3′-5′ to 5′-3′ or 2′-5′ to 5′-2′. Various salts, mixed salts and free acid forms are also included.

[0296] Representative U.S. patents that teach the preparation of the above phosphorus-containing linkages include, but are not limited to, U.S. Pat. Nos. 3,687,808; 4,469,863; 4,476,301; 5,023,243; 5,177,195; 5,188,897; 5,264,423; 5,276,019; 5,278,302; 5,286,717; 5,321,131; 5,399,676; 5,405,939; 5,453,496; 5,455,233; 5,466,677; 5,476,925; 5,519,126; 5,536,821; 5,541,316; 5,550,111; 5,563,253; 5,571,799; 5,587,361; 5,625,050; 6,028,188; 6,124,445; 6,160,109; 6,169,170; 6,172,209; 6,239,265; 6,277,603; 6,326,199; 6,346,614; 6,444,423; 6,531,590; 6,534,639; 6,608,035; 6,683,167; 6,858,715; 6,867,294; 6,878,805; 7,015,315; 7,041,816; 7,273,933; 7,321,029; and U.S. Pat. RE39464, the entire contents of each of which are hereby incorporated herein by reference.

[0297] Modified RNA backbones that do not include a phosphorus atom therein have backbones that are formed by short chain alkyl or cycloalkyl internucleoside linkages, mixed heteroatoms and alkyl or cycloalkyl internucleoside linkages, or one or more short chain heteroatomic or heterocyclic internucleoside linkages. These include those having morpholino linkages (formed in part from the sugar portion of a nucleoside); siloxane backbones; sulfide, sulfoxide and sulfone backbones; formacetyl and thioformacetyl backbones; methylene formacetyl and thioformacetyl backbones; alkene containing backbones; sulfamate backbones; methyleneimino and methylenehydrazino backbones; sulfonate and sulfonamide backbones; amide backbones; and others having mixed N, O, S and CH₂ component parts.

[0298] Representative U.S. patents that teach the preparation of the above oligonucleosides include, but are not limited to, U.S. Pat. Nos. 5,034,506; 5,166,315; 5,185,444; 5,214,134; 5,216,141; 5,235,033; 5,64,562; 5,264,564; 5,405,938; 5,434,257; 5,466,677; 5,470,967; 5,489,677; 5,541,307; 5,561,225; 5,596,086; 5,602,240; 5,608,046; 5,610,289; 5,618,704; 5,623,070; 5,663,312; 5,633,360; 5,677,437; and, 5,677,439, the entire contents of each of which are hereby incorporated herein by reference.

[0299] In other embodiments, suitable RNA mimetics are contemplated for use in iRNAs, in which both the sugar and the internucleoside linkage, i.e., the backbone, of the nucleotide units are replaced with novel groups. The base units are maintained for hybridization with an appropriate nucleic acid target compound. One such oligomeric compound, an RNA mimetic that has been shown to have excellent hybridization properties, is referred to as a peptide nucleic acid (PNA). In PNA compounds, the sugar backbone of an RNA is replaced with an amide containing backbone, in particular an aminoethylglycine backbone. The nucleobases are retained and are bound directly or indirectly to aza nitrogen atoms of the amide portion of the backbone. Representative U.S. patents that teach the preparation of PNA compounds include, but are not limited to, U.S. Pat. Nos. 5,539,082; 5,714,331; and 5,719,262, the entire contents of each of which are hereby incorporated herein by reference. Additional PNA compounds suitable for use in the iRNAs of the invention are described in, for example, in Nielsen et al., Science, 1991, 254, 1497-1500.

[0300] Some embodiments featured in the invention include RNAs with phosphorothioate backbones and oligonucleosides with heteroatom backbones, and in particular —CH₂—NH—CH₂—, —CH₂—N(CH₃)—O—CH₂— [known as a methylene (methylimino) or MMI backbone], —CH₂—O—N(CH₃)—CH₂—, —CH₂—N(CH₃)—N(CH₃)—CH₂— and —N(CH₃)—CH₂—CH₂— [wherein the native phosphodiester backbone is represented as —O—P—O—CH₂—] of the above-referenced U.S. Pat. No. 5,489,677, and the amide backbones of the above-referenced U.S. Pat. No. 5,602,240. In some embodiments, the RNAs featured herein have morpholino backbone structures of the above-referenced U.S. Pat. No. 5,034,506.

[0301] Modified RNAs can also contain one or more substituted sugar moieties. The iRNAs, e.g., dsRNAs, featured herein can include one of the following at the 2′-position: OH; F; O-, S-, or N-alkyl; O-, S-, or N-alkenyl; O-, S- or N-alkynyl; or O-alkyl-O-alkyl, wherein the alkyl, alkenyl and alkynyl can be substituted or unsubstituted C₁ to C₁₀ alkyl or C₂ to C₁₀ alkenyl and alkynyl. Exemplary suitable modifications include O[(CH₂)ₙO]ₘCH₃, O(CH₂).ₙOCH₃, O(CH₂)ₙNH₂, O(CH₂)ₙCH₃, O(CH₂)ₙONH₂, and O(CH₂)ₙON[(CH₂)ₙCH₃)]₂, where n and m are from 1 to about 10. In other embodiments, dsRNAs include one of the following at the 2′ position: C₁ to C₁₀ lower alkyl, substituted lower alkyl, alkaryl, aralkyl, O-alkaryl or O-aralkyl, SH, SCH₃, OCN, Cl, Br, CN, CF₃, OCF₃, SOCH₃, SO₂CH₃, ONO₂, NO₂, N₃, NH₂, heterocycloalkyl, heterocycloalkaryl, aminoalkylamino, polyalkylamino, substituted silyl, an RNA cleaving group, a reporter group, an intercalator, a group for improving the pharmacokinetic properties of an iRNA, or a group for improving the pharmacodynamic properties of an iRNA, and other substituents having similar properties. In some embodiments, the modification includes a 2′-methoxyethoxy (2′-O—CH₂CH₂OCH₃, also known as 2′-O-(2-methoxyethyl) or 2′-MOE) (Martin et al., Helv. Chim. Acta, 1995, 78:486-504) i.e., an alkoxy-alkoxy group. Another exemplary modification is 2′-dimethylaminooxyethoxy, i.e., a O(CH₂)₂ON(CH₃)₂ group, also known as 2′-DMAOE, as described in examples herein below, and 2′-dimethylaminoethoxyethoxy (also known in the art as 2′-O-dimethylaminoethoxyethyl or 2′-DMAEOE), i.e., 2′-O—CH₂—O—CH₂—N(CH₂)₂. Further exemplary modifications include: 5′-Me-2′-F nucleotides, 5′-Me-2′-OMe nucleotides, 5′-Me-2′-deoxynucleotides, (both R and S isomers in these three families); 2′-alkoxyalkyl; and 2′-NMA (N-methylacetamide).

[0302] Other modifications include 2′-methoxy (2′-OCH₃), 2′-aminopropoxy (2′-OCH₂CH₂CH₂NH₂) and 2′-fluoro (2′-F). Similar modifications can also be made at other positions on the RNA of an iRNA, particularly the 3′ position of the sugar on the 3′ terminal nucleotide or in 2′-5′ linked dsRNAs and the 5′ position of 5′ terminal nucleotide. iRNAs can also have sugar mimetics such as cyclobutyl moieties in place of the pentofuranosyl sugar. Representative U.S. patents that teach the preparation of such modified sugar structures include, but are not limited to, U.S. Pat. Nos. 4,981,957; 5,118,800; 5,319,080; 5,359,044; 5,393,878; 5,446,137; 5,466,786; 5,514,785; 5,519,134; 5,567,811; 5,576,427; 5,591,722; 5,597,909; 5,610,300; 5,627,053; 5,639,873; 5,646,265; 5,658,873; 5,670,633; and 5,700,920, certain of which are commonly owned with the instant application. The entire contents of each of the foregoing are hereby incorporated herein by reference.

[0303] An iRNA of the invention can also include nucleobase (often referred to in the art simply as “base”) modifications or substitutions. As used herein, “unmodified” or “natural” nucleobases include the purine bases adenine (A) and guanine (G), and the pyrimidine bases thymine (T), cytosine (C) and uracil (U). Modified nucleobases include other synthetic and natural nucleobases such as 5-methylcytosine (5-me-C), 5-hydroxymethyl cytosine, xanthine, hypoxanthine, 2-aminoadenine, 6-methyl and other alkyl derivatives of adenine and guanine, 2-propyl and other alkyl derivatives of adenine and guanine, 2-thiouracil, 2-thiothymine and 2-thiocytosine, 5-halouracil and cytosine, 5-propynyl uracil and cytosine, 6-azo uracil, cytosine and thymine, 5-uracil (pseudouracil), 4-thiouracil, 8-halo, 8-amino, 8-thiol, 8-thioalkyl, 8-hydroxyl anal other 8-substituted adenines and guanines, 5-halo, particularly 5-bromo, 5-trifluoromethyl and other 5-substituted uracils and cytosines, 7-methylguanine and 7-methyladenine, 8-azaguanine and 8-azaadenine, 7-deazaguanine and 7-daazaadenine and 3-deazaguanine and 3-deazaadenine. Further nucleobases include those disclosed in U.S. Pat. No. 3,687,808, those disclosed in Modified Nucleosides in Biochemistry, Biotechnology and Medicine, Herdewijn, P. ed. Wiley-VCH, 2008; those disclosed in The Concise Encyclopedia Of Polymer Science And Engineering, pages 858-859, Kroschwitz, J. L, ed. John Wiley & Sons, 1990, these disclosed by Englisch et al., (1991) Angewandte Chemie, International Edition, 30:613, and those disclosed by Sanghvi, Y S., Chapter 15, dsRNA Research and Applications, pages 289-302, Crooke, S. T. and Lebleu, B., Ed., CRC Press, 1993. Certain of these nucleobases are particularly useful for increasing the binding affinity of the oligomeric compounds featured in the invention. These include 5-substituted pyrimidines, 6-azapyrimidines and N-2, N-6 and 0-6 substituted purines, including 2-aminopropyladenine, 5-propynyluracil and 5-propynylcytosine. 5-methylcytosine substitutions have been shown to increase nucleic acid duplex stability by 0.6-1.2° C. (Sanghvi, Y. S., Crooke, S. T. and Lebleu, B., Eds., dsRNA Research and Applications, CRC Press, Boca Raton, 1993, pp. 276-278) and are exemplary base substitutions, even more particularly when combined with 2′-O-methoxyethyl sugar modifications.

[0304] Representative U.S. patents that teach the preparation of certain of the above noted modified nucleobases as well as other modified nucleobases include, but are not limited to, the above noted U.S. Pat. Nos. 3,687,808, 4,845,205; 5,130,30; 5,134,066; 5,175,273; 5,367,066; 5,432,272; 5,457,187; 5,459,255; 5,484,908; 5,502,177; 5,525,711; 5,552,540; 5,587,469; 5,594,121, 5,596,091; 5,614,617; 5,681,941; 5,750,692; 6,015,886; 6,147,200; 6,166,197; 6,222,025; 6,235,887; 6,380,368; 6,528,640; 6,639,062; 6,617,438; 7,045,610; 7,427,672; and 7,495,088, the entire contents of each of which are hereby incorporated herein by reference.

[0305] An iRNA of the invention can also be modified to include one or more locked nucleic acids (LNA). A locked nucleic acid is a nucleotide having a modified ribose moiety in which the ribose moiety comprises an extra bridge connecting the 2′ and 4′ carbons. This structure effectively “locks” the ribose in the 3′-endo structural conformation. The addition of locked nucleic acids to siRNAs has been shown to increase siRNA stability in serum, and to reduce off-target effects (Elmen, J. et al., (2005) Nucleic Acids Research 33(1):439-447; Mook, O R. et al., (2007) Mol Canc Ther 6(3):833-843; Grunweller, A. et al., (2003) Nucleic Acids Research 31(12):3185-3193).

[0306] An iRNA of the invention can also be modified to include one or more bicyclic sugar moities. A “bicyclic sugar” is a furanosyl ring modified by the bridging of two atoms. A “bicyclic nucleoside” (“BNA”) is a nucleoside having a sugar moiety comprising a bridge connecting two carbon atoms of the sugar ring, thereby forming a bicyclic ring system. In certain embodiments, the bridge connects the 4′-carbon and the 2′-carbon of the sugar ring. Thus, in some embodiments an agent of the invention may include one or more locked nucleic acids (LNA). A locked nucleic acid is a nucleotide having a modified ribose moiety in which the ribose moiety comprises an extra bridge connecting the 2′ and 4′ carbons. In other words, an LNA is a nucleotide comprising a bicyclic sugar moiety comprising a 4′-CH2-O-2′ bridge. This structure effectively “locks” the ribose in the 3′-endo structural conformation. The addition of locked nucleic acids to siRNAs has been shown to increase siRNA stability in serum, and to reduce off-target effects (Elmen, J. et al., (2005) Nucleic Acids Research 33(1):439-447; Mook, O R. et al., (2007) Mol Canc Ther 6(3):833-843; Grunweller, A. et al., (2003) Nucleic Acids Research 31(12):3185-3193). Examples of bicyclic nucleosides for use in the polynucleotides of the invention include without limitation nucleosides comprising a bridge between the 4′ and the 2′ ribosyl ring atoms. In certain embodiments, the antisense polynucleotide agents of the invention include one or more bicyclic nucleosides comprising a 4′ to 2′ bridge. Examples of such 4′ to 2′ bridged bicyclic nucleosides, include but are not limited to 4′-(CH2)-O-2′ (LNA); 4′-(CH2)-S-2′; 4′-(CH2)2-O-2′ (ENA); 4′-CH(CH3)-O-2′ (also referred to as “constrained ethyl” or “cEt”) and 4′-CH(CH2OCH3)-O-2′ (and analogs thereof; see, e.g., U.S. Pat. No. 7,399,845); 4′-C(CH3)(CH3)-O-2′ (and analogs thereof; see e.g., U.S. Pat. No. 8,278,283); 4′-CH2-N(OCH3)-2′ (and analogs thereof; see e.g., U.S. Pat. No. 8,278,425); 4′-CH2-O—N(CH3)-2′ (see, e.g., U.S. Patent Publication No. 2004/0171570); 4′-CH2-N(R)—O-2′, wherein R is H, C1-C12 alkyl, or a protecting group (see, e.g., U.S. Pat. No. 7,427,672); 4′-CH2—C(H)(CH3)-2′ (see, e.g., Chattopadhyaya et al., J. Org. Chem., 2009, 74, 118-134); and 4′-CH2-C(═CH2)-2′ (and analogs thereof; see, e.g., U.S. Pat. No. 8,278,426). The entire contents of each of the foregoing are hereby incorporated herein by reference.

[0307] Additional representative U.S. patents and US Patent Publications that teach the preparation of locked nucleic acid nucleotides include, but are not limited to, the following: U.S. Pat. Nos. 6,268,490; 6,525,191; 6,670,461; 6,770,748; 6,794,499; 6,998,484; 7,053,207; 7,034,133; 7,084,125; 7,399,845; 7,427,672; 7,569,686; 7,741,457; 8,022,193; 8,030,467; 8,278,425; 8,278,426; 8,278,283; US 2008/0039618; and US 2009/0012281, the entire contents of each of which are hereby incorporated herein by reference.

[0308] Any of the foregoing bicyclic nucleosides can be prepared having one or more stereochemical sugar configurations including for example α-L-ribofuranose and β-D-ribofuranose (see WO 99/14226).

[0309] An iRNA of the invention can also be modified to include one or more constrained ethyl nucleotides. As used herein, a “constrained ethyl nucleotide” or “cEt” is a locked nucleic acid comprising a bicyclic sugar moiety comprising a 4′-CH(CH3)-O-2′ bridge. In one embodiment, a constrained ethyl nucleotide is in the S conformation referred to herein as “S-cEt.”

[0310] An iRNA of the invention may also include one or more “conformationally restricted nucleotides” (“CRN”). CRN are nucleotide analogs with a linker connecting the C2′ and C4′ carbons of ribose or the C3 and −05′ carbons of ribose. CRN lock the ribose ring into a stable conformation and increase the hybridization affinity to mRNA. The linker is of sufficient length to place the oxygen in an optimal position for stability and affinity resulting in less ribose ring puckering.

[0311] Representative publications that teach the preparation of certain of the above noted CRN include, but are not limited to, US Patent Publication No. 2013/0190383; and PCT publication WO 2013/036868, the entire contents of each of which are hereby incorporated herein by reference.

[0312] In some embodiments, an iRNA of the invention comprises one or more monomers that are UNA (unlocked nucleic acid) nucleotides. UNA is unlocked acyclic nucleic acid, wherein any of the bonds of the sugar has been removed, forming an unlocked “sugar” residue. In one example, UNA also encompasses monomer with bonds between C1′-C4′ have been removed (i.e. the covalent carbon-oxygen-carbon bond between the C1′ and C4′ carbons). In another example, the C2′-C3′ bond (i.e. the covalent carbon-carbon bond between the C2′ and C3′ carbons) of the sugar has been removed (see Nuc. Acids Symp. Series, 52, 133-134 (2008) and Fluiter et al., Mol. Biosyst., 2009, 10, 1039 hereby incorporated by reference).

[0313] Representative U.S. publications that teach the preparation of UNA include, but are not limited to, U.S. Pat. No. 8,314,227; and US Patent Publication Nos. 2013/0096289; 2013/0011922; and 2011/0313020, the entire contents of each of which are hereby incorporated herein by reference.

[0314] Potentially stabilizing modifications to the ends of RNA molecules can include N-(acetylaminocaproyl)-4-hydroxyprolinol (Hyp-C6-NHAc), N-(caproyl-4-hydroxyprolinol (Hyp-C6), N-(acetyl-4-hydroxyprolinol (Hyp-NHAc), thymidine-2′-0-deoxythymidine (ether), N-(aminocaproyl)-4-hydroxyprolinol (Hyp-C6-amino), 2-docosanoyl-uridine-3″-phosphate, inverted base dT(idT) and others. Disclosure of this modification can be found in PCT Publication No. WO 2011/005861.

[0315] Other modifications of an iRNA of the invention include a 5′ phosphate or 5′ phosphate mimic, e.g., a 5′-terminal phosphate or phosphate mimic on the antisense strand of an RNAi agent. Suitable phosphate mimics are disclosed in, for example US Patent Publication No. 2012/0157511, the entire contents of which are incorporated herein by reference.

[0316] In certain specific embodiments, an RNAi agent of the present invention is an agent that inhibits the expression of an LDHA gene which is selected from the group of agents listed in any one of Tables 2-5. In other embodiments, an RNAi agent of the present invention is an dual targeting iRNA agent that inhibits the expression of an LDHA gene and an HAO1, wherein the first dsRNA inhibits expression of an LDHA gene and is selected from the group of agents listed in any one of Tables 2-5, and and the first dsRNA inhibits expression of an HAO1 gene and is selected from the group of agents listed in any one of Tables 7-14. Any of these agents may further comprise a ligand.

[0317] A. Modified iRNAs Comprising Motifs of the Invention

[0318] In certain aspects of the invention, the double stranded RNAi agents of the invention include agents with chemical modifications as disclosed, for example, in WO 2013/075035, filed on Nov. 16, 2012, the entire contents of which are incorporated herein by reference.

[0319] It is to be understood that, in embodiments in which a first dsRNA agent targeting LDHA and a second dsRNA agent targeting HAO1 are covalently attached (i.e., a dual targeting RNAi agent), the first agent may comprise any one or more of the motifs described below, the second agent may comprise any one or more of the motifs described below, or both the first agent and the second agent may independently comprise any one or more of the motifs described below.

[0320] Accordingly, the invention provides double stranded RNAi agents capable of inhibiting the expression of a target gene (i.e., an LDHA gene or an LDHA gene and an HAO1 gene) in vivo. The RNAi agent comprises a sense strand and an antisense strand. Each strand of the RNAi agent may range from 12-30 nucleotides in length. For example, each strand may be between 14-30 nucleotides in length, 17-30 nucleotides in length, 25-30 nucleotides in length, 27-30 nucleotides in length, 17-23 nucleotides in length, 17-21 nucleotides in length, 17-19 nucleotides in length, 19-25 nucleotides in length, 19-23 nucleotides in length, 19-21 nucleotides in length, 21-25 nucleotides in length, or 21-23 nucleotides in length.

[0321] The sense strand and antisense strand typically form a duplex double stranded RNA (“dsRNA”), also referred to herein as an “RNAi agent.” The duplex region of an RNAi agent may be 12-30 nucleotide pairs in length. For example, the duplex region can be between 14-30 nucleotide pairs in length, 17-30 nucleotide pairs in length, 27-30 nucleotide pairs in length, 17-23 nucleotide pairs in length, 17-21 nucleotide pairs in length, 17-19 nucleotide pairs in length, 19-25 nucleotide pairs in length, 19-23 nucleotide pairs in length, 19-21 nucleotide pairs in length, 21-25 nucleotide pairs in length, or 21-23 nucleotide pairs in length. In another example, the duplex region is selected from 15, 16, 17, 18, 19, 20, 21, 22, 23, 24, 25, 26, and 27 nucleotides in length.

[0322] In one embodiment, the RNAi agent may contain one or more overhang regions and/or capping groups at the 3′-end, 5′-end, or both ends of one or both strands. The overhang can be 1-6 nucleotides in length, for instance 2-6 nucleotides in length, 1-5 nucleotides in length, 2-5 nucleotides in length, 1-4 nucleotides in length, 2-4 nucleotides in length, 1-3 nucleotides in length, 2-3 nucleotides in length, or 1-2 nucleotides in length. The overhangs can be the result of one strand being longer than the other, or the result of two strands of the same length being staggered. The overhang can form a mismatch with the target mRNA or it can be complementary to the gene sequences being targeted or can be another sequence. The first and second strands can also be joined, e.g., by additional bases to form a hairpin, or by other non-base linkers.

[0323] In one embodiment, the nucleotides in the overhang region of the RNAi agent can each independently be a modified or unmodified nucleotide including, but no limited to 2′-sugar modified, such as, 2-F, 2′-Omethyl, thymidine (T), 2′-O-methoxyethyl-5-methyluridine (Teo), 2′-O-methoxyethyladenosine (Aeo), 2′-O-methoxyethyl-5-methylcytidine (m5Ceo), and any combinations thereof. For example, TT can be an overhang sequence for either end on either strand. The overhang can form a mismatch with the target mRNA or it can be complementary to the gene sequences being targeted or can be another sequence.

[0324] The 5′- or 3′-overhangs at the sense strand, antisense strand or both strands of the RNAi agent may be phosphorylated. In some embodiments, the overhang region(s) contains two nucleotides having a phosphorothioate between the two nucleotides, where the two nucleotides can be the same or different. In one embodiment, the overhang is present at the 3′-end of the sense strand, antisense strand, or both strands. In one embodiment, this 3′-overhang is present in the antisense strand. In one embodiment, this 3′-overhang is present in the sense strand.

[0325] The RNAi agent may contain only a single overhang, which can strengthen the interference activity of the RNAi, without affecting its overall stability. For example, the single-stranded overhang may be located at the 3′-terminal end of the sense strand or, alternatively, at the 3′-terminal end of the antisense strand. The RNAi may also have a blunt end, located at the 5′-end of the antisense strand (or the 3′-end of the sense strand) or vice versa. Generally, the antisense strand of the RNAi has a nucleotide overhang at the 3′-end, and the 5′-end is blunt. While not wishing to be bound by theory, the asymmetric blunt end at the 5′-end of the antisense strand and 3′-end overhang of the antisense strand favor the guide strand loading into RISC process.

[0326] In one embodiment, the RNAi agent is a double ended bluntmer of 19 nucleotides in length, wherein the sense strand contains at least one motif of three 2′-F modifications on three consecutive nucleotides at positions 7, 8, 9 from the 5′end. The antisense strand contains at least one motif of three 2′-O-methyl modifications on three consecutive nucleotides at positions 11, 12, 13 from the 5′end.

[0327] In another embodiment, the RNAi agent is a double ended bluntmer of 20 nucleotides in length, wherein the sense strand contains at least one motif of three 2′-F modifications on three consecutive nucleotides at positions 8, 9, 10 from the 5′end. The antisense strand contains at least one motif of three 2′-O-methyl modifications on three consecutive nucleotides at positions 11, 12, 13 from the 5′end.

[0328] In yet another embodiment, the RNAi agent is a double ended bluntmer of 21 nucleotides in length, wherein the sense strand contains at least one motif of three 2′-F modifications on three consecutive nucleotides at positions 9, 10, 11 from the 5′end. The antisense strand contains at least one motif of three 2′-O-methyl modifications on three consecutive nucleotides at positions 11, 12, 13 from the 5′end.

[0329] In one embodiment, the RNAi agent comprises a 21 nucleotide sense strand and a 23 nucleotide antisense strand, wherein the sense strand contains at least one motif of three 2′-F modifications on three consecutive nucleotides at positions 9, 10, 11 from the 5′end; the antisense strand contains at least one motif of three 2′-O-methyl modifications on three consecutive nucleotides at positions 11, 12, 13 from the 5′end, wherein one end of the RNAi agent is blunt, while the other end comprises a 2 nucleotide overhang. Preferably, the 2 nucleotide overhang is at the 3′-end of the antisense strand.

[0330] When the 2 nucleotide overhang is at the 3′-end of the antisense strand, there may be two phosphorothioate internucleotide linkages between the terminal three nucleotides, wherein two of the three nucleotides are the overhang nucleotides, and the third nucleotide is a paired nucleotide next to the overhang nucleotide. In one embodiment, the RNAi agent additionally has two phosphorothioate internucleotide linkages between the terminal three nucleotides at both the 5′-end of the sense strand and at the 5′-end of the antisense strand. In one embodiment, every nucleotide in the sense strand and the antisense strand of the RNAi agent, including the nucleotides that are part of the motifs are modified nucleotides. In one embodiment each residue is independently modified with a 2′-O-methyl or 3′-fluoro, e.g., in an alternating motif. Optionally, the RNAi agent further comprises a ligand (preferably GalNAc₃).

[0331] In one embodiment, the RNAi agent comprises a sense and an antisense strand, wherein the sense strand is 25-30 nucleotide residues in length, wherein starting from the 5′ terminal nucleotide (position 1) positions 1 to 23 of the first strand comprise at least 8 ribonucleotides; the antisense strand is 36-66 nucleotide residues in length and, starting from the 3′ terminal nucleotide, comprises at least 8 ribonucleotides in the positions paired with positions 1-23 of sense strand to form a duplex; wherein at least the 3 ‘ terminal nucleotide of antisense strand is unpaired with sense strand, and up to 6 consecutive 3’ terminal nucleotides are unpaired with sense strand, thereby forming a 3′ single stranded overhang of 1-6 nucleotides; wherein the 5′ terminus of antisense strand comprises from 10-30 consecutive nucleotides which are unpaired with sense strand, thereby forming a 10-30 nucleotide single stranded 5′ overhang; wherein at least the sense strand 5′ terminal and 3′ terminal nucleotides are base paired with nucleotides of antisense strand when sense and antisense strands are aligned for maximum complementarity, thereby forming a substantially duplexed region between sense and antisense strands; and antisense strand is sufficiently complementary to a target RNA along at least 19 ribonucleotides of antisense strand length to reduce target gene expression when the double stranded nucleic acid is introduced into a mammalian cell; and wherein the sense strand contains at least one motif of three 2′-F modifications on three consecutive nucleotides, where at least one of the motifs occurs at or near the cleavage site. The antisense strand contains at least one motif of three 2′-O-methyl modifications on three consecutive nucleotides at or near the cleavage site.

[0332] In one embodiment, the RNAi agent comprises sense and antisense strands, wherein the RNAi agent comprises a first strand having a length which is at least 25 and at most 29 nucleotides and a second strand having a length which is at most 30 nucleotides with at least one motif of three 2′-O-methyl modifications on three consecutive nucleotides at position 11, 12, 13 from the 5′ end; wherein the 3′ end of the first strand and the 5′ end of the second strand form a blunt end and the second strand is 1-4 nucleotides longer at its 3′ end than the first strand, wherein the duplex region region which is at least 25 nucleotides in length, and the second strand is sufficiently complemenatary to a target mRNA along at least 19 nucleotide of the second strand length to reduce target gene expression when the RNAi agent is introduced into a mammalian cell, and wherein dicer cleavage of the RNAi agent preferentially results in an siRNA comprising the 3′ end of the second strand, thereby reducing expression of the target gene in the mammal. Optionally, the RNAi agent further comprises a ligand.

[0333] In one embodiment, the sense strand of the RNAi agent contains at least one motif of three identical modifications on three consecutive nucleotides, where one of the motifs occurs at the cleavage site in the sense strand.

[0334] In one embodiment, the antisense strand of the RNAi agent can also contain at least one motif of three identical modifications on three consecutive nucleotides, where one of the motifs occurs at or near the cleavage site in the antisense strand.

[0335] For an RNAi agent having a duplex region of 17-23 nucleotide in length, the cleavage site of the antisense strand is typically around the 10, 11 and 12 positions from the 5′-end. Thus the motifs of three identical modifications may occur at the 9, 10, 11 positions; 10, 11, 12 positions; 11, 12, 13 positions; 12, 13, 14 positions; or 13, 14, 15 positions of the antisense strand, the count starting from the 1^{st} nucleotide from the 5′-end of the antisense strand, or, the count starting from the 1^{st} paired nucleotide within the duplex region from the 5′-end of the antisense strand. The cleavage site in the antisense strand may also change according to the length of the duplex region of the RNAi from the 5′-end.

[0336] The sense strand of the RNAi agent may contain at least one motif of three identical modifications on three consecutive nucleotides at the cleavage site of the strand; and the antisense strand may have at least one motif of three identical modifications on three consecutive nucleotides at or near the cleavage site of the strand. When the sense strand and the antisense strand form a dsRNA duplex, the sense strand and the antisense strand can be so aligned that one motif of the three nucleotides on the sense strand and one motif of the three nucleotides on the antisense strand have at least one nucleotide overlap, i.e., at least one of the three nucleotides of the motif in the sense strand forms a base pair with at least one of the three nucleotides of the motif in the antisense strand. Alternatively, at least two nucleotides may overlap, or all three nucleotides may overlap.

[0337] In one embodiment, the sense strand of the RNAi agent may contain more than one motif of three identical modifications on three consecutive nucleotides. The first motif may occur at or near the cleavage site of the strand and the other motifs may be a wing modification. The term “wing modification” herein refers to a motif occurring at another portion of the strand that is separated from the motif at or near the cleavage site of the same strand. The wing modification is either adajacent to the first motif or is separated by at least one or more nucleotides. When the motifs are immediately adjacent to each other then the chemistry of the motifs are distinct from each other and when the motifs are separated by one or more nucleotide than the chemistries can be the same or different. Two or more wing modifications may be present. For instance, when two wing modifications are present, each wing modification may occur at one end relative to the first motif which is at or near cleavage site or on either side of the lead motif.

[0338] Like the sense strand, the antisense strand of the RNAi agent may contain more than one motifs of three identical modifications on three consecutive nucleotides, with at least one of the motifs occurring at or near the cleavage site of the strand. This antisense strand may also contain one or more wing modifications in an alignment similar to the wing modifications that may be present on the sense strand.

[0339] In one embodiment, the wing modification on the sense strand or antisense strand of the RNAi agent typically does not include the first one or two terminal nucleotides at the 3′-end, 5′-end or both ends of the strand.

[0340] In another embodiment, the wing modification on the sense strand or antisense strand of the RNAi agent typically does not include the first one or two paired nucleotides within the duplex region at the 3′-end, 5′-end or both ends of the strand.

[0341] When the sense strand and the antisense strand of the RNAi agent each contain at least one wing modification, the wing modifications may fall on the same end of the duplex region, and have an overlap of one, two or three nucleotides.

[0342] When the sense strand and the antisense strand of the RNAi agent each contain at least two wing modifications, the sense strand and the antisense strand can be so aligned that two modifications each from one strand fall on one end of the duplex region, having an overlap of one, two or three nucleotides; two modifications each from one strand fall on the other end of the duplex region, having an overlap of one, two or three nucleotides; two modifications one strand fall on each side of the lead motif, having an overlap of one, two or three nucleotides in the duplex region.

[0343] In one embodiment, every nucleotide in the sense strand and antisense strand of the RNAi agent, including the nucleotides that are part of the motifs, may be modified. Each nucleotide may be modified with the same or different modification which can include one or more alteration of one or both of the non-linking phosphate oxygens and/or of one or more of the linking phosphate oxygens; alteration of a constituent of the ribose sugar, e.g., of the 2′ hydroxyl on the ribose sugar; wholesale replacement of the phosphate moiety with “dephospho” linkers; modification or replacement of a naturally occurring base; and replacement or modification of the ribose-phosphate backbone.

[0344] As nucleic acids are polymers of subunits, many of the modifications occur at a position which is repeated within a nucleic acid, e.g., a modification of a base, or a phosphate moiety, or a non-linking O of a phosphate moiety. In some cases the modification will occur at all of the subject positions in the nucleic acid but in many cases it will not. By way of example, a modification may only occur at a 3′ or 5′ terminal position, may only occur in a terminal region, e.g., at a position on a terminal nucleotide or in the last 2, 3, 4, 5, or 10 nucleotides of a strand. A modification may occur in a double strand region, a single strand region, or in both. A modification may occur only in the double strand region of a RNA or may only occur in a single strand region of a RNA. For example, a phosphorothioate modification at a non-linking O position may only occur at one or both termini, may only occur in a terminal region, e.g., at a position on a terminal nucleotide or in the last 2, 3, 4, 5, or 10 nucleotides of a strand, or may occur in double strand and single strand regions, particularly at termini. The 5′ end or ends can be phosphorylated.

[0345] It may be possible, e.g., to enhance stability, to include particular bases in overhangs, or to include modified nucleotides or nucleotide surrogates, in single strand overhangs, e.g., in a 5′ or 3′ overhang, or in both. For example, it can be desirable to include purine nucleotides in overhangs. In some embodiments all or some of the bases in a 3′ or 5′ overhang may be modified, e.g., with a modification described herein. Modifications can include, e.g., the use of modifications at the 2′ position of the ribose sugar with modifications that are known in the art, e.g., the use of deoxyribonucleotides, 2′-deoxy-2′-fluoro (2′-F) or 2′-O-methyl modified instead of the ribosugar of the nucleobase, and modifications in the phosphate group, e.g., phosphorothioate modifications. Overhangs need not be homologous with the target sequence.

[0346] In one embodiment, each residue of the sense strand and antisense strand is independently modified with LNA, CRN, cET, UNA, HNA, CeNA, 2′-methoxyethyl, 2′-O-methyl, 2′-O-allyl, 2′-C-allyl, 2′-deoxy, 2′-hydroxyl, or 2′-fluoro. The strands can contain more than one modification. In one embodiment, each residue of the sense strand and antisense strand is independently modified with 2′-O-methyl or 2′-fluoro.

[0347] At least two different modifications are typically present on the sense strand and antisense strand. Those two modifications may be the 2′-O-methyl or 2′-fluoro modifications, or others.

[0348] In one embodiment, the Nₐ and/or N_{b} comprise modifications of an alternating pattern. The term “alternating motif” as used herein refers to a motif having one or more modifications, each modification occurring on alternating nucleotides of one strand. The alternating nucleotide may refer to one per every other nucleotide or one per every three nucleotides, or a similar pattern. For example, if A, B and C each represent one type of modification to the nucleotide, the alternating motif can be “ABABABABABAB . . . ,” “AABBAABBAABB . . . ,” “AABAABAABAAB . . . ,” “AAABAAABAAAB . . . ,” “AAABBBAAABBB . . . ,” or “ABCABCABCABC . . . ,” etc.

[0349] The type of modifications contained in the alternating motif may be the same or different. For example, if A, B, C, D each represent one type of modification on the nucleotide, the alternating pattern, i.e., modifications on every other nucleotide, may be the same, but each of the sense strand or antisense strand can be selected from several possibilities of modifications within the alternating motif such as “ABABAB . . . ”, “ACACAC . . . ” “BDBDBD . . . ” or “CDCDCD . . . ,” etc.

[0350] In one embodiment, the RNAi agent of the invention comprises the modification pattern for the alternating motif on the sense strand relative to the modification pattern for the alternating motif on the antisense strand is shifted. The shift may be such that the modified group of nucleotides of the sense strand corresponds to a differently modified group of nucleotides of the antisense strand and vice versa. For example, the sense strand when paired with the antisense strand in the dsRNA duplex, the alternating motif in the sense strand may start with “ABABAB” from 5′-3′ of the strand and the alternating motif in the antisense strand may start with “BABABA” from 5′-3′ of the strand within the duplex region. As another example, the alternating motif in the sense strand may start with “AABBAABB” from 5′-3′ of the strand and the alternating motif in the antisenese strand may start with “BBAABBAA” from 5′-3′ of the strand within the duplex region, so that there is a complete or partial shift of the modification patterns between the sense strand and the antisense strand.

[0351] In one embodiment, the RNAi agent comprises the pattern of the alternating motif of 2′-O-methyl modification and 2′-F modification on the sense strand initially has a shift relative to the pattern of the alternating motif of 2′-O-methyl modification and 2′-F modification on the antisense strand initially, i.e., the 2′-O-methyl modified nucleotide on the sense strand base pairs with a 2′-F modified nucleotide on the antisense strand and vice versa. The 1 position of the sense strand may start with the 2′-F modification, and the 1 position of the antisense strand may start with the 2′-O-methyl modification.

[0352] The introduction of one or more motifs of three identical modifications on three consecutive nucleotides to the sense strand and/or antisense strand interrupts the initial modification pattern present in the sense strand and/or antisense strand. This interruption of the modification pattern of the sense and/or antisense strand by introducing one or more motifs of three identical modifications on three consecutive nucleotides to the sense and/or antisense strand surprisingly enhances the gene silencing acitivty to the target gene.

[0353] In one embodiment, when the motif of three identical modifications on three consecutive nucleotides is introduced to any of the strands, the modification of the nucleotide next to the motif is a different modification than the modification of the motif. For example, the portion of the sequence containing the motif is “ . . . NₐYYYN_{b} . . . ,” where “Y” represents the modification of the motif of three identical modifications on three consecutive nucleotide, and “Nₐ” and “N_{b}” represent a modification to the nucleotide next to the motif “YYY” that is different than the modification of Y, and where Nₐ and N_{b} can be the same or different modifications. Alternatively, Nₐ and/or N_{b} may be present or absent when there is a wing modification present.

[0354] The RNAi agent may further comprise at least one phosphorothioate or methylphosphonate internucleotide linkage. The phosphorothioate or methylphosphonate internucleotide linkage modification may occur on any nucleotide of the sense strand or antisense strand or both strands in any position of the strand. For instance, the internucleotide linkage modification may occur on every nucleotide on the sense strand and/or antisense strand; each internucleotide linkage modification may occur in an alternating pattern on the sense strand and/or antisense strand; or the sense strand or antisense strand may contain both internucleotide linkage modifications in an alternating pattern. The alternating pattern of the internucleotide linkage modification on the sense strand may be the same or different from the antisense strand, and the alternating pattern of the internucleotide linkage modification on the sense strand may have a shift relative to the alternating pattern of the internucleotide linkage modification on the antisense strand. In one embodiment, a double-standed RNAi agent comprises 6-8phosphorothioate internucleotide linkages. In one embodiment, the antisense strand comprises two phosphorothioate internucleotide linkages at the 5′-terminus and two phosphorothioate internucleotide linkages at the 3′-terminus, and the sense strand comprises at least two phosphorothioate internucleotide linkages at either the 5′-terminus or the 3′-terminus.

[0355] In one embodiment, the RNAi comprises a phosphorothioate or methylphosphonate internucleotide linkage modification in the overhang region. For example, the overhang region may contain two nucleotides having a phosphorothioate or methylphosphonate internucleotide linkage between the two nucleotides. Internucleotide linkage modifications also may be made to link the overhang nucleotides with the terminal paired nucleotides within the duplex region. For example, at least 2, 3, 4, or all the overhang nucleotides may be linked through phosphorothioate or methylphosphonate internucleotide linkage, and optionally, there may be additional phosphorothioate or methylphosphonate internucleotide linkages linking the overhang nucleotide with a paired nucleotide that is next to the overhang nucleotide. For instance, there may be at least two phosphorothioate internucleotide linkages between the terminal three nucleotides, in which two of the three nucleotides are overhang nucleotides, and the third is a paired nucleotide next to the overhang nucleotide. These terminal three nucleotides may be at the 3′-end of the antisense strand, the 3′-end of the sense strand, the 5′-end of the antisense strand, and/or the 5′end of the antisense strand.

[0356] In one embodiment, the 2 nucleotide overhang is at the 3′-end of the antisense strand, and there are two phosphorothioate internucleotide linkages between the terminal three nucleotides, wherein two of the three nucleotides are the overhang nucleotides, and the third nucleotide is a paired nucleotide next to the overhang nucleotide. Optionally, the RNAi agent may additionally have two phosphorothioate internucleotide linkages between the terminal three nucleotides at both the 5′-end of the sense strand and at the 5′-end of the antisense strand.

[0357] In one embodiment, the RNAi agent comprises mismatch(es) with the target, within the duplex, or combinations thereof. The mistmatch may occur in the overhang region or the duplex region. The base pair may be ranked on the basis of their propensity to promote dissociation or melting (e.g., on the free energy of association or dissociation of a particular pairing, the simplest approach is to examine the pairs on an individual pair basis, though next neighbor or similar analysis can also be used). In terms of promoting dissociation: A:U is preferred over G:C; G:U is preferred over G:C; and I:C is preferred over G:C (I=inosine). Mismatches, e.g., non-canonical or other than canonical pairings (as described elsewhere herein) are preferred over canonical (A:T, A:U, G:C) pairings; and pairings which include a universal base are preferred over canonical pairings.

[0358] In one embodiment, the RNAi agent comprises at least one of the first 1, 2, 3, 4, or 5 base pairs within the duplex regions from the 5′-end of the antisense strand independently selected from the group of: A:U, G:U, I:C, and mismatched pairs, e.g., non-canonical or other than canonical pairings or pairings which include a universal base, to promote the dissociation of the antisense strand at the 5′-end of the duplex.

[0359] In one embodiment, the nucleotide at the 1 position within the duplex region from the 5′-end in the antisense strand is selected from the group consisting of A, dA, dU, U, and dT. Alternatively, at least one of the first 1, 2 or 3 base pair within the duplex region from the 5′-end of the antisense strand is an AU base pair. For example, the first base pair within the duplex region from the 5′-end of the antisense strand is an AU base pair.

[0360] In another embodiment, the nucleotide at the 3′-end of the sense strand is deoxy-thymine (dT). In another embodiment, the nucleotide at the 3′-end of the antisense strand is deoxy-thymine (dT). In one embodiment, there is a short sequence of deoxy-thymine nucleotides, for example, two dT nucleotides on the 3′-end of the sense and/or antisense strand.

[0361] In one embodiment, the sense strand sequence may be represented by formula (I):

(I)
5′ nₚ-Nₐ-(X X X)ᵢ-N_{b}-Y Y Y-N_{b}-(Z Z Z)ⱼ-Nₐ-n_{q} 3′

[0362] wherein:

[0363] i and j are each independently 0 or 1;

[0364] p and q are each independently 0-6;
[0365] each Nₐ independently represents an oligonucleotide sequence comprising 0-25 modified nucleotides, each sequence comprising at least two differently modified nucleotides;
[0366] each N_{b} independently represents an oligonucleotide sequence comprising 0-10 modified nucleotides;
[0367] each nₚ and n_{q} independently represent an overhang nucleotide;
[0368] wherein Nb and Y do not have the same modification; and
[0369] XXX, YYY and ZZZ each independently represent one motif of three identical modifications on three consecutive nucleotides. Preferably YYY is all 2′-F modified nucleotides.

[0370] In one embodiment, the Nₐ and/or N_{b} comprise modifications of alternating pattern.

[0371] In one embodiment, the YYY motif occurs at or near the cleavage site of the sense strand. For example, when the RNAi agent has a duplex region of 17-23 nucleotides in length, the YYY motif can occur at or the vicinity of the cleavage site (e.g.: can occur at positions 6, 7, 8, 7, 8, 9, 8, 9, 10, 9, 10, 11, 10, 11, 12 or 11, 12, 13) of—the sense strand, the count starting from the 1^{st} nucleotide, from the 5′-end; or optionally, the count starting at the 1^{st} paired nucleotide within the duplex region, from the 5′-end.

[0372] In one embodiment, i is 1 and j is 0, or i is 0 and j is 1, or both i and j are 1. The sense strand can therefore be represented by the following formulas:

(Ib)

5′ nₚ-Nₐ-YYY-N_{b}-ZZZ-Nₐ-n_{q} 3′;

(Ic)

5′ nₚ-Nₐ-XXX-N_{b}-YYY-Nₐ-n_{q} 3′;
or

(Id)

5′ nₚ-Nₐ-XXX-N_{b}-YYY-N_{b}-ZZZ-Nₐ-n_{q} 3′.

[0373] When the sense strand is represented by formula (Ib), N_{b} represents an oligonucleotide sequence comprising 0-10, 0-7, 0-5, 0-4, 0-2 or 0 modified nucleotides. Each Nₐ independently can represent an oligonucleotide sequence comprising 2-20, 2-15, or 2-10 modified nucleotides.

[0374] When the sense strand is represented as formula (Ic), N_{b} represents an oligonucleotide sequence comprising 0-10, 0-7, 0-10, 0-7, 0-5, 0-4, 0-2 or 0 modified nucleotides. Each Nₐ can independently represent an oligonucleotide sequence comprising 2-20, 2-15, or 2-10 modified nucleotides.

[0375] When the sense strand is represented as formula (Id), each N_{b} independently represents an oligonucleotide sequence comprising 0-10, 0-7, 0-5, 0-4, 0-2 or 0 modified nucleotides. Preferably, N_{b} is 0, 1, 2, 3, 4, 5 or 6. Each Nₐ can independently represent an oligonucleotide sequence comprising 2-20, 2-15, or 2-10 modified nucleotides.

[0376] Each of X, Y and Z may be the same or different from each other.

[0377] In other embodiments, i is 0 and j is 0, and the sense strand may be represented by the formula:

(Ia)

5′ nₚ-Nₐ-YYY-Nₐ-n_{q} 3′.

[0378] When the sense strand is represented by formula (Ia), each Nₐ independently can represent an oligonucleotide sequence comprising 2-20, 2-15, or 2-10 modified nucleotides.

[0379] In one embodiment, the antisense strand sequence of the RNAi may be represented by formula (II):

(II)
5′ n_{q′}-Nₐ′-(Z′Z′Z′)ₖ-N_{b}′-Y′Y′Y′-N_{b}′-(X′X′X′)₁-Nₐ′-
nₚ′ 3′

[0380] wherein:

[0381] k and l are each independently 0 or 1;

[0382] p′ and q′ are each independently 0-6;
[0383] each Nₐ′ independently represents an oligonucleotide sequence comprising 0-25 modified nucleotides, each sequence comprising at least two differently modified nucleotides;
[0384] each N_{b}′ independently represents an oligonucleotide sequence comprising 0-10 modified nucleotides;
[0385] each nₚ′ and n_{q}′ independently represent an overhang nucleotide;
[0386] wherein N_{b}′ and Y′ do not have the same modification; and
[0387] X′X′X′, Y′Y′Y′ and Z′Z′Z′ each independently represent one motif of three identical modifications on three consecutive nucleotides.

[0388] In one embodiment, the Nₐ′ and/or N_{b}′ comprise modifications of alternating pattern.

[0389] The Y′Y′Y′ motif occurs at or near the cleavage site of the antisense strand. For example, when the RNAi agent has a duplex region of 17-23nucleotidein length, the Y′Y′Y′ motif can occur at positions 9, 10, 11; 10, 11, 12; 11, 12, 13; 12, 13, 14; or 13, 14, 15 of the antisense strand, with the count starting from the 1^{st} nucleotide, from the 5′-end; or optionally, the count starting at the 1^{st} paired nucleotide within the duplex region, from the 5′-end. Preferably, the Y′Y′Y′ motif occurs at positions 11, 12, 13.

[0390] In one embodiment, Y′Y′Y′ motif is all 2′-OMe modified nucleotides.

[0391] In one embodiment, k is 1 and 1 is 0, or k is 0 and 1 is 1, or both k and 1 are 1.

[0392] The antisense strand can therefore be represented by the following formulas:

(IIb)
5′ n_{q′}-Nₐ′-Z′Z′Z′-N_{b}′-Y′Y′Y′-Nₐ′-n_{p′} 3′;
(IIc)
5′ n_{q′}-Nₐ′-Y′Y′Y′-N_{b}′-X′X′X′-n_{p′} 3′;
or
(IId)
5′ n_{q′}-Nₐ′-Z′Z′Z′-N_{b}′-Y′Y′Y′-N_{b}′-X′X′X′-Nₐ′-
n_{p′} 3′.

[0393] When the antisense strand is represented by formula (IIb), N_{b}′ represents an oligonucleotide sequence comprising 0-10, 0-7, 0-10, 0-7, 0-5, 0-4, 0-2 or 0 modified nucleotides. Each Nₐ′ independently represents an oligonucleotide sequence comprising 2-20, 2-15, or 2-10 modified nucleotides.

[0394] When the antisense strand is represented as formula (IIc), N_{b}′ represents an oligonucleotide sequence comprising 0-10, 0-7, 0-10, 0-7, 0-5, 0-4, 0-2 or 0 modified nucleotides. Each Nₐ′ independently represents an oligonucleotide sequence comprising 2-20, 2-15, or 2-10 modified nucleotides.

[0395] When the antisense strand is represented as formula (IId), each N_{b}′ independently represents an oligonucleotide sequence comprising 0-10, 0-7, 0-10, 0-7, 0-5, 0-4, 0-2 or 0 modified nucleotides. Each Nₐ′ independently represents an oligonucleotide sequence comprising 2-20, 2-15, or 2-10 modified nucleotides. Preferably, N_{b} is 0, 1, 2, 3, 4, 5 or 6.

[0396] In other embodiments, k is 0 and 1 is 0 and the antisense strand may be represented by the formula:

(Ia)

5′ n_{p′}-N_{a′}-Y′Y′Y′-N_{a′}-n_{q′} 3′.

[0397] When the antisense strand is represented as formula (IIa), each Nₐ′ independently represents an oligonucleotide sequence comprising 2-20, 2-15, or 2-10 modified nucleotides.

[0398] Each of X′, Y′ and Z′ may be the same or different from each other.

[0399] Each nucleotide of the sense strand and antisense strand may be independently modified with LNA, CRN, UNA, cEt, HNA, CeNA, 2′-methoxyethyl, 2′-O-methyl, 2′-O-allyl, 2′-C-allyl, 2′-hydroxyl, or 2′-fluoro. For example, each nucleotide of the sense strand and antisense strand is independently modified with 2′-O-methyl or 2′-fluoro. Each X, Y, Z, X′, Y′ and Z′, in particular, may represent a 2′-O-methyl modification or a 2′-fluoro modification.

[0400] In one embodiment, the sense strand of the RNAi agent may contain YYY motif occurring at 9, 10 and 11 positions of the strand when the duplex region is 21 nt, the count starting from the 1^{st} nucleotide from the 5′-end, or optionally, the count starting at the 1^{st} paired nucleotide within the duplex region, from the 5′-end; and Y represents 2′-F modification. The sense strand may additionally contain XXX motif or ZZZ motifs as wing modifications at the opposite end of the duplex region; and XXX and ZZZ each independently represents a 2′-OMe modification or 2′-F modification.

[0401] In one embodiment the antisense strand may contain Y′Y′Y′ motif occurring at positions 11, 12, 13 of the strand, the count starting from the 1st nucleotide from the 5′ end, or optionally, the count starting at the 1st paired nucleotide within the duplex region, from the 5′-end; and Y′ represents 2′-O-methyl modification. The antisense strand may additionally contain X′X′X′ motif or Z′Z′Z′ motifs as wing modifications at the opposite end of the duplex region; and X′X′X′ and Z′Z′Z′ each independently represents a 2′-OMe modification or 2′-F modification.

[0402] The sense strand represented by any one of the above formulas (Ia), (Ib), (Ic), and (Id) forms a duplex with a antisense strand being represented by any one of formulas (IIa), (IIb), (IIc), and (IId), respectively.

[0403] Accordingly, the RNAi agents for use in the methods of the invention may comprise a sense strand and an antisense strand, each strand having 14 to 30 nucleotides, the RNAi duplex represented by formula (III).

sense:
5′ np-Na-(X X X)i-Nb-Y Y Y-Nb-(Z Z Z)j-Na-nq 3′
antisense:
(III)
3′ np′-Na′-(X′X′X′)k-Nb′-Y′Y′Y′-Nb′-(Z′Z′Z′)1-Na′-
nq′ 5′

[0404] wherein:

[0405] i, j, k, and 1 are each independently 0 or 1;

[0406] p, p′, q, and q′ are each independently 0-6;
[0407] each Na and Na′ independently represents an oligonucleotide sequence comprising 0-25 modified nucleotides, each sequence comprising at least two differently modified nucleotides;
[0408] each Nb and Nb′ independently represents an oligonucleotide sequence comprising 0-10 modified nucleotides;
[0409] wherein each np′, np, nq′, and nq, each of which may or may not be present, independently represents an overhang nucleotide; and
[0410] XXX, YYY, ZZZ, X′X′X′, Y′Y′Y′, and Z′Z′Z′ each independently represent one motif of three identical modifications on three consecutive nucleotides.

[0411] In one embodiment, i is 0 and j is 0; or i is 1 and j is 0; or i is 0 and j is 1; or both i and j are 0; or both i and j are 1. In another embodiment, k is 0 and l is 0; or k is 1 and l is 0; k is 0 and l is 1; or both k and 1 are 0; or both k and l are 1.

[0412] Exemplary combinations of the sense strand and antisense strand forming a RNAi duplex include the formulas below:

(IIIa)
5′ np-Na-Y Y Y-Na-nq 3′
3′ np′-Na′-Y′Y′Y′-Na′nq′ 5′
(IIIb)
5′ np-Na -Y Y Y-Nb-Z Z Z-Na-nq 3′
3′ np′-Na′-Y′Y′Y′-Nb′-Z′Z′Z′-Na′nq′ 5′
(IIIc)
5′ np-Na-X X X-Nb-Y Y Y-Na-nq 3′
3′ np′-Na′-X′X′X′-Nb′-Y′Y′Y′-Na′-nq′ 5′
(IIId)
5′ np-Na-X X X-Nb-Y Y Y-Nb-Z Z Z-Na-nq 3′
3′ np′-Na′-X′X′X′-Nb′-Y′Y′Y′-Nb′-Z′Z′Z′-Na-nq′ 5′

[0413] When the RNAi agent is represented by formula (IIIa), each Na independently represents an oligonucleotide sequence comprising 2-20, 2-15, or 2-10 modified nucleotides.

[0414] When the RNAi agent is represented by formula (IIIB), each Nb independently represents an oligonucleotide sequence comprising 1-10, 1-7, 1-5 or 1-4 modified nucleotides. Each Na independently represents an oligonucleotide sequence comprising 2-20, 2-15, or 2-10 modified nucleotides.

[0415] When the RNAi agent is represented as formula (Inc), each Nb, Nb′ independently represents an oligonucleotide sequence comprising 0-10, 0-7, 0-10, 0-7, 0-5, 0-4, 0-2 or 0 modified nucleotides. Each Na independently represents an oligonucleotide sequence comprising 2-20, 2-15, or 2-10 modified nucleotides.

[0416] When the RNAi agent is represented as formula (Ind), each Nb, Nb′ independently represents an oligonucleotide sequence comprising 0-10, 0-7, 0-10, 0-7, 0-5, 0-4, 0-2 or Omodified nucleotides. Each Na, Na′ independently represents an oligonucleotide sequence comprising 2-20, 2-15, or 2-10 modified nucleotides. Each of Na, Na′, Nb and Nb′ independently comprises modifications of alternating pattern.

[0417] Each of X, Y and Z in formulas (III), (IIIa), (IIIb), (IIIc), and (IIId) may be the same or different from each other.

[0418] When the RNAi agent is represented by formula (III), (IIIa), (IIIb), (IIIc), and (IIId), at least one of the Y nucleotides may form a base pair with one of the Y′ nucleotides. Alternatively, at least two of the Y nucleotides form base pairs with the corresponding Y′ nucleotides; or all three of the Y nucleotides all form base pairs with the corresponding Y′ nucleotides.

[0419] When the RNAi agent is represented by formula (IIIb) or (IIId), at least one of the Z nucleotides may form a base pair with one of the Z′ nucleotides. Alternatively, at least two of the Z nucleotides form base pairs with the corresponding Z′ nucleotides; or all three of the Z nucleotides all form base pairs with the corresponding Z′ nucleotides.

[0420] When the RNAi agent is represented as formula (Inc) or (IIkt), at least one of the X nucleotides may form a base pair with one of the X′ nucleotides. Alternatively, at least two of the X nucleotides form base pairs with the corresponding X′ nucleotides; or all three of the X nucleotides all form base pairs with the corresponding X′ nucleotides.

[0421] In one embodiment, the modification on the Y nucleotide is different than the modification on the Y′ nucleotide, the modification on the Z nucleotide is different than the modification on the Z′ nucleotide, and/or the modification on the X nucleotide is different than the modification on the X′ nucleotide.

[0422] In one embodiment, when the RNAi agent is represented by formula (IIkt), the Na modifications are 2′-O-methyl or 2′-fluoro modifications. In another embodiment, when the RNAi agent is represented by formula (IIkt), the Na modifications are 2′-O-methyl or 2′-fluoro modifications and np′>0 and at least one np′ is linked to a neighboring nucleotide a via phosphorothioate linkage. In yet another embodiment, when the RNAi agent is represented by formula (IIkt), the Na modifications are 2′-O-methyl or 2′-fluoro modifications, np′>0 and at least one np′ is linked to a neighboring nucleotide via phosphorothioate linkage, and the sense strand is conjugated to one or more GalNAc derivatives attached through a bivalent or trivalent branched linker (described below). In another embodiment, when the RNAi agent is represented by formula (IIId), the Na modifications are 2′-O-methyl or 2′-fluoro modifications, np′>0 and at least one np′ is linked to a neighboring nucleotide via phosphorothioate linkage, the sense strand comprises at least one phosphorothioate linkage, and the sense strand is conjugated to one or more GalNAc derivatives attached through a bivalent or trivalent branched linker.

[0423] In one embodiment, when the RNAi agent is represented by formula (IIIa), the Na modifications are 2′-O-methyl or 2′-fluoro modifications, np′>0 and at least one np′ is linked to a neighboring nucleotide via phosphorothioate linkage, the sense strand comprises at least one phosphorothioate linkage, and the sense strand is conjugated to one or more GalNAc derivatives attached through a bivalent or trivalent branched linker.

[0424] In one embodiment, the RNAi agent is a multimer containing at least two duplexes represented by formula (III), (IIIa), (IIIb), (IIIc), and (IIId), wherein the duplexes are connected by a linker. The linker can be cleavable or non-cleavable. Optionally, the multimer further comprises a ligand. Each of the duplexes can target the same gene or two different genes; or each of the duplexes can target same gene at two different target sites.

[0425] In one embodiment, the RNAi agent is a multimer containing three, four, five, six or more duplexes represented by formula (III), (IIIa), (IIIb), (IIIc), and (IIId), wherein the duplexes are connected by a linker. The linker can be cleavable or non-cleavable. Optionally, the multimer further comprises a ligand. Each of the duplexes can target the same gene or two different genes; or each of the duplexes can target same gene at two different target sites.

[0426] In one embodiment, two RNAi agents represented by formula (III), (IIIa), (IIIB), (IIIc), and (IIId) are linked to each other at the 5′ end, and one or both of the 3′ ends and are optionally conjugated to a ligand. Each of the agents can target the same gene or two different genes; or each of the agents can target same gene at two different target sites.

[0427] In certain embodiments, an RNAi agent of the invention may contain a low number of nucleotides containing a 2′-fluoro modification, e.g., 10 or fewer nucleotides with 2′-fluoro modification. For example, the RNAi agent may contain 10, 9, 8, 7, 6, 5, 4, 3, 2, 1 or 0 nucleotides with a 2′-fluoro modification. In a specific embodiment, the RNAi agent of the invention contains 10 nucleotides with a 2′-fluoro modification, e.g., 4 nucleotides with a 2′-fluoro modification in the sense strand and 6 nucleotides with a 2′-fluoro modification in the antisense strand. In another specific embodiment, the RNAi agent of the invention contains 6 nucleotides with a 2′-fluoro modification, e.g., 4 nucleotides with a 2′-fluoro modification in the sense strand and 2 nucleotides with a 2′-fluoro modification in the antisense strand.

[0428] In other embodiments, an RNAi agent of the invention may contain an ultra low number of nucleotides containing a 2′-fluoro modification, e.g., 2 or fewer nucleotides containing a 2′-fluoro modification. For example, the RNAi agent may contain 2, 1 of 0 nucleotides with a 2′-fluoro modification. In a specific embodiment, the RNAi agent may contain 2 nucleotides with a 2′-fluoro modification, e.g., 0 nucleotides with a 2-fluoro modification in the sense strand and 2 nucleotides with a 2′-fluoro modification in the antisense strand.

[0429] Various publications describe multimeric RNAi agents that can be used in the methods of the invention. Such publications include WO2007/091269, U.S. Pat. No. 7,858,769, WO2010/141511, WO2007/117686, WO2009/014887 and WO2011/031520 the entire contents of each of which are hereby incorporated herein by reference.

[0430] As described in more detail below, the RNAi agent that contains conjugations of one or more carbohydrate moieties to a RNAi agent can optimize one or more properties of the RNAi agent. In many cases, the carbohydrate moiety will be attached to a modified subunit of the RNAi agent. For example, the ribose sugar of one or more ribonucleotide subunits of a dsRNA agent can be replaced with another moiety, e.g., a non-carbohydrate (preferably cyclic) carrier to which is attached a carbohydrate ligand. A ribonucleotide subunit in which the ribose sugar of the subunit has been so replaced is referred to herein as a ribose replacement modification subunit (RRMS). A cyclic carrier may be a carbocyclic ring system, i.e., all ring atoms are carbon atoms, or a heterocyclic ring system, i.e., one or more ring atoms may be a heteroatom, e.g., nitrogen, oxygen, sulfur. The cyclic carrier may be a monocyclic ring system, or may contain two or more rings, e.g. fused rings. The cyclic carrier may be a fully saturated ring system, or it may contain one or more double bonds.

[0431] The ligand may be attached to the polynucleotide via a carrier. The carriers include (i) at least one “backbone attachment point,” preferably two “backbone attachment points” and (ii) at least one “tethering attachment point.” A “backbone attachment point” as used herein refers to a functional group, e.g. a hydroxyl group, or generally, a bond available for, and that is suitable for incorporation of the carrier into the backbone, e.g., the phosphate, or modified phosphate, e.g., sulfur containing, backbone, of a ribonucleic acid. A “tethering attachment point” (TAP) in some embodiments refers to a constituent ring atom of the cyclic carrier, e.g., a carbon atom or a heteroatom (distinct from an atom which provides a backbone attachment point), that connects a selected moiety. The moiety can be, e.g., a carbohydrate, e.g. monosaccharide, disaccharide, trisaccharide, tetrasaccharide, oligosaccharide and polysaccharide. Optionally, the selected moiety is connected by an intervening tether to the cyclic carrier. Thus, the cyclic carrier will often include a functional group, e.g., an amino group, or generally, provide a bond, that is suitable for incorporation or tethering of another chemical entity, e.g., a ligand to the constituent ring.

[0432] The RNAi agents may be conjugated to a ligand via a carrier, wherein the carrier can be cyclic group or acyclic group; preferably, the cyclic group is selected from pyrrolidinyl, pyrazolinyl, pyrazolidinyl, imidazolinyl, imidazolidinyl, piperidinyl, piperazinyl, [1,3]dioxolane, oxazolidinyl, isoxazolidinyl, morpholinyl, thiazolidinyl, isothiazolidinyl, quinoxalinyl, pyridazinonyl, tetrahydrofuryl and and decalin; preferably, the acyclic group is selected from serinol backbone or diethanolamine backbone.

[0433] In another embodiment of the invention, an iRNA agent comprises a sense strand and an antisense strand, each strand having 14 to 40 nucleotides. The RNAi agent may be represented by formula (L):

[chemical structure]

[0434] In formula (L), B1, B2, B3, B1′, B2′, B3′, and B4′ each are independently a nucleotide containing a modification selected from the group consisting of 2′-O-alkyl, 2′-substituted alkoxy, 2′-substituted alkyl, 2′-halo, ENA, and BNA/LNA. In one embodiment, B1, B2, B3, B1′, B2′, B3′, and B4′ each contain 2′-OMe modifications. In one embodiment, B1, B2, B3, B1′, B2′, B3′, and B4′ each contain 2′-OMe or 2′-F modifications. In one embodiment, at least one of B1, B2, B3, B1′, B2′, B3′, and B4′ contain 2′-O—N-methylacetamido (2′-O-NMA) modification.

[0435] C1 is a thermally destabilizing nucleotide placed at a site opposite to the seed region of the antisense strand (i.e., at positions 2-8 of the 5′-end of the antisense strand). For example, C1 is at a position of the sense strand that pairs with a nucleotide at positions 2-8 of the 5′-end of the antisense strand. In one example, C1 is at position 15 from the 5′-end of the sense strand. C1 nucleotide bears the thermally destabilizing modification which can include abasic modification; mismatch with the opposing nucleotide in the duplex; and sugar modification such as 2′-deoxy modification or acyclic nucleotide e.g., unlocked nucleic acids (UNA) or glycerol nucleic acid (GNA). In one embodiment, C1 has thermally destabilizing modification selected from the group consisting of: i) mismatch with the opposing nucleotide in the antisense strand; ii) abasic modification selected from the group consisting of:

[chemical structure]

and iii) sugar modification selected from the group consisting of:

[chemical structure]

wherein B is a modified or unmodified nucleobase, R¹ and R² independently are H, halogen, OR₃, or alkyl; and R₃ is H, alkyl, cycloalkyl, aryl, aralkyl, heteroaryl or sugar. In one embodiment, the thermally destabilizing modification in C1 is a mismatch selected from the group consisting of G:G, G:A, G:U, G:T, A:A, A:C, C:C, C:U, C:T, U:U, T:T, and U:T; and optionally, at least one nucleobase in the mismatch pair is a 2′-deoxy nucleobase. In one example, the thermally destabilizing modification in C1 is GNA or

[chemical structure]

[0436] T1, T1′, T2′, and T3′ each independently represent a nucleotide comprising a modification providing the nucleotide a steric bulk that is less or equal to the steric bulk of a 2′-OMe modification. A steric bulk refers to the sum of steric effects of a modification. Methods for determining steric effects of a modification of a nucleotide are known to one skilled in the art. The modification can be at the 2′ position of a ribose sugar of the nucleotide, or a modification to a non-ribose nucleotide, acyclic nucleotide, or the backbone of the nucleotide that is similar or equivalent to the 2′ position of the ribose sugar, and provides the nucleotide a steric bulk that is less than or equal to the steric bulk of a 2′-OMe modification. For example, T1, T1′, T2′, and T3′ are each independently selected from DNA, RNA, LNA, 2′-F, and 2′-F-5′-methyl. In one embodiment, T1 is DNA. In one embodiment, T1′ is DNA, RNA or LNA. In one embodiment, T2′ is DNA or RNA. In one embodiment, T3′ is DNA or RNA.

[0437] n¹, n³, and q¹ are independently 4 to 15 nucleotides in length.

[0438] n⁵, q³, and q⁷ are independently 1-6 nucleotide(s) in length.

[0439] n⁴, q², and q⁶ are independently 1-3 nucleotide(s) in length; alternatively, n⁴ is 0.

[0440] q⁵ is independently 0-10 nucleotide(s) in length.

[0441] n² and q⁴ are independently 0-3 nucleotide(s) in length.

[0442] Alternatively, n⁴ is 0-3 nucleotide(s) in length.

[0443] In one embodiment, n⁴ can be 0. In one example, n⁴ is 0, and q² and q⁶ are 1. In another example, n⁴ is 0, and q² and q⁶ are 1, with two phosphorothioate internucleotide linkage modifications within position 1-5 of the sense strand (counting from the 5′-end of the sense strand), and two phosphorothioate internucleotide linkage modifications at positions 1 and 2 and two phosphorothioate internucleotide linkage modifications within positions 18-23 of the antisense strand (counting from the 5′-end of the antisense strand).

[0444] In one embodiment, n⁴, q², and q⁶ are each 1.

[0445] In one embodiment, n², n⁴, q², q⁴, and q⁶ are each 1.

[0446] In one embodiment, C1 is at position 14-17 of the 5′-end of the sense strand, when the sense strand is 19-22 nucleotides in length, and n⁴ is 1. In one embodiment, C1 is at position 15 of the 5′-end of the sense strand

[0447] In one embodiment, T3′ starts at position 2 from the 5′ end of the antisense strand. In one example, T3′ is at position 2 from the 5′ end of the antisense strand and q⁶ is equal to 1.

[0448] In one embodiment, T1′ starts at position 14 from the 5′ end of the antisense strand. In one example, T1′ is at position 14 from the 5′ end of the antisense strand and q² is equal to 1.

[0449] In an exemplary embodiment, T3′ starts from position 2 from the 5′ end of the antisense strand and T1′ starts from position 14 from the 5′ end of the antisense strand. In one example, T3′ starts from position 2 from the 5′ end of the antisense strand and q⁶ is equal to 1 and T1′ starts from position 14 from the 5′ end of the antisense strand and q² is equal to 1.

[0450] In one embodiment, T1′ and T3′ are separated by 11 nucleotides in length (i.e. not counting the T1′ and T3′ nucleotides).

[0451] In one embodiment, T1′ is at position 14 from the 5′ end of the antisense strand. In one example, T1′ is at position 14 from the 5′ end of the antisense strand and q² is equal to 1, and the modification at the 2′ position or positions in a non-ribose, acyclic or backbone that provide less steric bulk than a 2′-OMe ribose.

[0452] In one embodiment, T3′ is at position 2 from the 5′ end of the antisense strand. In one example, T3′ is at position 2 from the 5′ end of the antisense strand and q⁶ is equal to 1, and the modification at the 2′ position or positions in a non-ribose, acyclic or backbone that provide less than or equal to steric bulk than a 2′-OMe ribose.

[0453] In one embodiment, T1 is at the cleavage site of the sense strand. In one example, T1 is at position 11 from the 5′ end of the sense strand, when the sense strand is 19-22 nucleotides in length, and n² is 1. In an exemplary embodiment, T1 is at the cleavage site of the sense strand at position 11 from the 5′ end of the sense strand, when the sense strand is 19-22 nucleotides in length, and n² is 1,

[0454] In one embodiment, T2′ starts at position 6 from the 5′ end of the antisense strand. In one example, T2′ is at positions 6-10 from the 5′ end of the antisense strand, and q⁴ is 1.

[0455] In an exemplary embodiment, T1 is at the cleavage site of the sense strand, for instance, at position 11 from the 5′ end of the sense strand, when the sense strand is 19-22 nucleotides in length, and n² is 1; T1′ is at position 14 from the 5′ end of the antisense strand, and q² is equal to 1, and the modification to T1′ is at the 2′ position of a ribose sugar or at positions in a non-ribose, acyclic or backbone that provide less steric bulk than a 2′-OMe ribose; T2′ is at positions 6-10 from the 5′ end of the antisense strand, and q⁴ is 1; and T3′ is at position 2 from the 5′ end of the antisense strand, and q⁶ is equal to 1, and the modification to T3′ is at the 2′ position or at positions in a non-ribose, acyclic or backbone that provide less than or equal to steric bulk than a 2′-OMe ribose.

[0456] In one embodiment, T2′ starts at position 8 from the 5′ end of the antisense strand. In one example, T2′ starts at position 8 from the 5′ end of the antisense strand, and q⁴ is 2.

[0457] In one embodiment, T2′ starts at position 9 from the 5′ end of the antisense strand. In one example, T2′ is at position 9 from the 5′ end of the antisense strand, and q⁴ is 1.

[0458] In one embodiment, BF is 2′-OMe or 2′-F, q¹ is 9, T1′ is 2′-F, q² is 1, B2′ is 2′-OMe or 2′-F, q³ is 4, T2′ is 2′-F, q⁴ is 1, B3′ is 2′-OMe or 2′-F, q⁵ is 6, T3′ is 2′-F, q⁶ is 1, B4′ is 2′-OMe, and q⁷ is 1; with two phosphorothioate internucleotide linkage modifications within positions 1-5 of the sense strand (counting from the 5′-end of the sense strand), and two phosphorothioate internucleotide linkage modifications at positions 1 and 2 and two phosphorothioate internucleotide linkage modifications within positions 18-23 of the antisense strand (counting from the 5′-end of the antisense strand).

[0459] In one embodiment, n⁴ is 0, B3 is 2′-OMe, n⁵ is 3, B1′ is 2′-OMe or 2′-F, q¹ is 9, T1′ is 2′-F, q² is 1, B2′ is 2′-OMe or 2′-F, q³ is 4, T2′ is 2′-F, q⁴ is 1, B3′ is 2′-OMe or 2′-F, q⁵ is 6, T3′ is 2′-F, q⁶ is 1, B4′ is 2′-OMe, and q⁷ is 1; with two phosphorothioate internucleotide linkage modifications within positions 1-5 of the sense strand (counting from the 5′-end of the sense strand), and two phosphorothioate internucleotide linkage modifications at positions 1 and 2 and two phosphorothioate internucleotide linkage modifications within positions 18-23 of the antisense strand (counting from the 5′-end of the antisense strand).

[0460] In one embodiment, B1 is 2′-OMe or 2′-F, n¹ is 8, T1 is 2′F, n² is 3, B2 is 2′-OMe, n³ is 7, n⁴ is 0, B3 is 2′OMe, n⁵ is 3, B1′ is 2′-OMe or 2′-F, q¹ is 9, T1′ is 2′-F, q² is 1, B2′ is 2′-OMe or 2′-F, q³ is 4, T2′ is 2′-F, q⁴ is 2, B3′ is 2′-OMe or 2′-F, q⁵ is 5, T3′ is 2′-F, q⁶ is 1, B4′ is 2′-OMe, and q⁷ is 1.

[0461] In one embodiment, B1 is 2′-OMe or 2′-F, n¹ is 8, T1 is 2′F, n² is 3, B2 is 2′-OMe, n³ is 7, n⁴ is 0, B3 is 2′-OMe, n⁵ is 3, B1′ is 2′-OMe or 2′-F, q¹ is 9, T1′ is 2′-F, q² is 1, B2′ is 2′-OMe or 2′-F, q³ is 4, T2′ is 2′-F, q⁴ is 2, B3′ is 2′-OMe or 2′-F, q⁵ is 5, T3′ is 2′-F, q⁶ is 1, B4′ is 2′-OMe, and q⁷ is 1; with two phosphorothioate internucleotide linkage modifications within positions 1-5 of the sense strand (counting from the 5′-end of the sense strand), and two phosphorothioate internucleotide linkage modifications at positions 1 and 2 and two phosphorothioate internucleotide linkage modifications within positions 18-23 of the antisense strand (counting from the 5′-end of the antisense strand).

[0462] In one embodiment, B1 is 2′-OMe or 2′-F, n¹ is 6, T1 is 2′F, n² is 3, B2 is 2′-OMe, n³ is 7, n⁴ is 0, B3 is 2′OMe, n⁵ is 3, B1′ is 2′-OMe or 2′-F, q¹ is 7, T1′ is 2′-F, q² is 1, B2′ is 2′-OMe or 2′-F, q³ is 4, T2′ is 2′-F, q⁴ is 2, B3′ is 2′-OMe or 2′-F, q⁵ is 5, T3′ is 2′-F, q⁶ is 1, B4′ is 2′-OMe, and q⁷ is 1.

[0463] In one embodiment, B1 is 2′-OMe or 2′-F, n¹ is 6, T1 is 2′F, n² is 3, B2 is 2′-OMe, n³ is 7, n⁴ is 0, B3 is 2′-OMe, n⁵ is 3, B1′ is 2′-OMe or 2′-F, q¹ is 7, T1′ is 2′-F, q² is 1, B2′ is 2′-OMe or 2′-F, q³ is 4, T2′ is 2′-F, q⁴ is 2, B3′ is 2′-OMe or 2′-F, q⁵ is 5, T3′ is 2′-F, q⁶ is 1, B4′ is 2′-OMe, and q⁷ is 1; with two phosphorothioate internucleotide linkage modifications within positions 1-5 of the sense strand (counting from the 5′-end of the sense strand), and two phosphorothioate internucleotide linkage modifications at positions 1 and 2 and two phosphorothioate internucleotide linkage modifications within positions 18-23 of the antisense strand (counting from the 5′-end of the antisense strand).

[0464] In one embodiment, B1 is 2′-OMe or 2′-F, n¹ is 8, T1 is 2′F, n² is 3, B2 is 2′-OMe, n³ is 7, n⁴ is 0, B3 is 2′OMe, n⁵ is 3, B1′ is 2′-OMe or 2′-F, q¹ is 9, T1′ is 2′-F, q² is 1, B2′ is 2′-OMe or 2′-F, q³ is 4, T2′ is 2′-F, q⁴ is 1, B3′ is 2′-OMe or 2′-F, q⁵ is 6, T3′ is 2′-F, q⁶ is 1, B4′ is 2′-OMe, and q⁷ is 1.

[0465] In one embodiment, B1 is 2′-OMe or 2′-F, n¹ is 8, T1 is 2′F, n² is 3, B2 is 2′-OMe, n³ is 7, n⁴ is 0, B3 is 2′-OMe, n⁵ is 3, B1′ is 2′-OMe or 2′-F, q¹ is 9, T1′ is 2′-F, q² is 1, B2′ is 2′-OMe or 2′-F, q³ is 4, T2′ is 2′-F, q⁴ is 1, B3′ is 2′-OMe or 2′-F, q⁵ is 6, T3′ is 2′-F, q⁶ is 1, B4′ is 2′-OMe, and q⁷ is 1; with two phosphorothioate internucleotide linkage modifications within positions 1-5 of the sense strand (counting from the 5′-end of the sense strand), and two phosphorothioate internucleotide linkage modifications at positions 1 and 2 and two phosphorothioate internucleotide linkage modifications within positions 18-23 of the antisense strand (counting from the 5′-end of the antisense strand).

[0466] In one embodiment, B1 is 2′-OMe or 2′-F, n¹ is 8, T1 is 2′F, n² is 3, B2 is 2′-OMe, n³ is 7, n⁴ is 0, B3 is 2′OMe, n⁵ is 3, B1′ is 2′-OMe or 2′-F, q¹ is 9, T1′ is 2′-F, q² is 1, B2′ is 2′-OMe or 2′-F, q³ is 5, T2′ is 2′-F, q⁴ is 1, B3′ is 2′-OMe or 2′-F, q⁵ is 5, T3′ is 2′-F, q⁶ is 1, B4′ is 2′-OMe, and q⁷ is 1; optionally with at least 2 additional TT at the 3′-end of the antisense strand.

[0467] In one embodiment, B1 is 2′-OMe or 2′-F, n¹ is 8, T1 is 2′F, n² is 3, B2 is 2′-OMe, n³ is 7, n⁴ is 0, B3 is 2′-OMe, n⁵ is 3, B1′ is 2′-OMe or 2′-F, q¹ is 9, T1′ is 2′-F, q² is 1, B2′ is 2′-OMe or 2′-F, q³ is 5, T2′ is 2′-F, q⁴ is 1, B3′ is 2′-OMe or 2′-F, q⁵ is 5, T3′ is 2′-F, q⁶ is 1, B4′ is 2′-OMe, and q⁷ is 1; optionally with at least 2 additional TT at the 3′-end of the antisense strand; with two phosphorothioate internucleotide linkage modifications within positions 1-5 of the sense strand (counting from the 5′-end of the sense strand), and two phosphorothioate internucleotide linkage modifications at positions 1 and 2 and two phosphorothioate internucleotide linkage modifications within positions 18-23 of the antisense strand (counting from the 5′-end of the antisense strand).

[0468] In one embodiment, B1 is 2′-OMe or 2′-F, n¹ is 8, T1 is 2′F, n² is 3, B2 is 2′-OMe, n³ is 7, n⁴ is 0, B3 is 2′-OMe, n⁵ is 3, B1′ is 2′-OMe or 2′-F, q¹ is 9, T1′ is 2′-F, q² is 1, B2′ is 2′-OMe or 2′-F, q³ is 4, q⁴ is 0, B3′ is 2′-OMe or 2′-F, q⁵ is 7, T3′ is 2′-F, q⁶ is 1, B4′ is 2′- OMe, and q⁷ is 1.

[0469] In one embodiment, B1 is 2′-OMe or 2′-F, n¹ is 8, T1 is 2′F, n² is 3, B2 is 2′-OMe, n³ is 7, n⁴ is 0, B3 is 2′-OMe, n⁵ is 3, B1′ is 2′-OMe or 2′-F, q¹ is 9, T1′ is 2′-F, q² is 1, B2′ is 2′-OMe or 2′-F, q³ is 4, q⁴ is 0, B3′ is 2′-OMe or 2′-F, q⁵ is 7, T3′ is 2′-F, q⁶ is 1, B4′ is 2′- OMe, and q⁷ is 1; with two phosphorothioate internucleotide linkage modifications within positions 1-5 of the sense strand (counting from the 5′-end), and two phosphorothioate internucleotide linkage modifications at positions 1 and 2 and two phosphorothioate internucleotide linkage modifications within positions 18-23 of the antisense strand (counting from the 5′-end).

[0470] In one embodiment, B1 is 2′-OMe or 2′-F, n¹ is 8, T1 is 2′F, n² is 3, B2 is 2′-OMe, n³ is 7, n⁴ is 0, B3 is 2′OMe, n⁵ is 3, B1′ is 2′-OMe or 2′-F, q¹ is 9, T1′ is 2′-F, q² is 1, B2′ is 2′-OMe or 2′-F, q³ is 4, T2′ is 2′-F, q⁴ is 2, B3′ is 2′-OMe or 2′-F, q⁵ is 5, T3′ is 2′-F, q⁶ is 1, B4′ is 2′-F, and q⁷ is 1.

[0471] In one embodiment, B1 is 2′-OMe or 2′-F, n¹ is 8, T1 is 2′F, n² is 3, B2 is 2′-OMe, n³ is 7, n⁴ is 0, B3 is 2′-OMe, n⁵ is 3, B1′ is 2′-OMe or 2′-F, q¹ is 9, T1′ is 2′-F, q² is 1, B2′ is 2′-OMe or 2′-F, q³ is 4, T2′ is 2′-F, q⁴ is 2, B3′ is 2′-OMe or 2′-F, q⁵ is 5, T3′ is 2′-F, q⁶ is 1, B4′ is 2′-F, and q⁷ is 1; with two phosphorothioate internucleotide linkage modifications within positions 1-5 of the sense strand (counting from the 5′-end of the sense strand), and two phosphorothioate internucleotide linkage modifications at positions 1 and 2 and two phosphorothioate internucleotide linkage modifications within positions 18-23 of the antisense strand (counting from the 5′-end of the antisense strand).

[0472] In one embodiment, B1 is 2′-OMe or 2′-F, n¹ is 8, T1 is 2′F, n² is 3, B2 is 2′-OMe, n³ is 7, n⁴ is 0, B3 is 2′-OMe, n⁵ is 3, B1′ is 2′-OMe or 2′-F, q¹ is 9, T1′ is 2′-F, q² is 1, B2′ is 2′-OMe or 2′-F, q³ is 4, q⁴ is 0, B3′ is 2′-OMe or 2′-F, q⁵ is 7, T3′ is 2′-F, q⁶ is 1, B4′ is 2′-F, and q⁷ is 1.

[0473] In one embodiment, B1 is 2′-OMe or 2′-F, n¹ is 8, T1 is 2′F, n² is 3, B2 is 2′-OMe, n³ is 7, n⁴ is 0, B3 is 2′-OMe, n⁵ is 3, B1′ is 2′-OMe or 2′-F, q¹ is 9, T1′ is 2′-F, q² is 1, B2′ is 2′-OMe or 2′-F, q³ is 4, q⁴ is 0, B3′ is 2′-OMe or 2′-F, q⁵ is 7, T3′ is 2′-F, q⁶ is 1, B4′ is 2′-F, and q⁷ is 1; with two phosphorothioate internucleotide linkage modifications within positions 1-5 of the sense strand (counting from the 5′-end of the sense strand), and two phosphorothioate internucleotide linkage modifications at positions 1 and 2 and two phosphorothioate internucleotide linkage modifications within positions 18-23 of the antisense strand (counting from the 5′-end of the antisense strand).

[0474] The RNAi agent can comprise a phosphorus-containing group at the 5′-end of the sense strand or antisense strand. The 5′-end phosphorus-containing group can be 5′-end phosphate (5′-P), 5′-end phosphorothioate (5′-PS), 5′-end phosphorodithioate (5′-PS₂), 5′-end vinylphosphonate (5′-VP), 5′-end methylphosphonate (MePhos), or 5′-deoxy-5′-C-malonyl

[chemical structure]

When the 5′-end phosphorus-containing group is 5′-end vinylphosphonate (5′-VP), the 5′-VP can be either 5′-E-VP isomer (i.e., trans-vinylphosphate,

[chemical structure]

5′-Z-VP isomer (i.e., cis-vinylphosphate,

[chemical structure]

or mixtures thereof.

[0475] In one embodiment, the RNAi agent comprises a phosphorus-containing group at the 5′-end of the sense strand. In one embodiment, the RNAi agent comprises a phosphorus-containing group at the 5′-end of the antisense strand.

[0476] In one embodiment, the RNAi agent comprises a 5′-P. In one embodiment, the RNAi agent comprises a 5′-P in the antisense strand.

[0477] In one embodiment, the RNAi agent comprises a 5′-PS. In one embodiment, the RNAi agent comprises a 5′-PS in the antisense strand.

[0478] In one embodiment, the RNAi agent comprises a 5′-VP. In one embodiment, the RNAi agent comprises a 5′-VP in the antisense strand. In one embodiment, the RNAi agent comprises a 5′-E-VP in the antisense strand. In one embodiment, the RNAi agent comprises a 5′-Z-VP in the antisense strand.

[0479] In one embodiment, the RNAi agent comprises a 5′-PS₂. In one embodiment, the RNAi agent comprises a 5′-PS₂ in the antisense strand.

[0480] In one embodiment, the RNAi agent comprises a 5′-PS₂. In one embodiment, the RNAi agent comprises a 5′-deoxy-5′-C-malonyl in the antisense strand.

[0481] In one embodiment, B1 is 2′-OMe or 2′-F, n¹ is 8, T1 is 2′F, n² is 3, B2 is 2′-OMe, n³ is 7, n⁴ is 0, B3 is 2′OMe, n⁵ is 3, B1′ is 2′-OMe or 2′-F, q¹ is 9, T1′ is 2′-F, q² is 1, B2′ is 2′-OMe or 2′-F, q³ is 4, T2′ is 2′-F, q⁴ is 2, B3′ is 2′-OMe or 2′-F, q⁵ is 5, T3′ is 2′-F, q⁶ is 1, B4′ is 2′-OMe, and q⁷ is 1. The RNAi agent also comprises a 5′-PS.

[0482] In one embodiment, B1 is 2′-OMe or 2′-F, n¹ is 8, T1 is 2′F, n² is 3, B2 is 2′-OMe, n³ is 7, n⁴ is 0, B3 is 2′OMe, n⁵ is 3, B1′ is 2′-OMe or 2′-F, q¹ is 9, T1′ is 2′-F, q² is 1, B2′ is 2′-OMe or 2′-F, q³ is 4, T2′ is 2′-F, q⁴ is 2, B3′ is 2′-OMe or 2′-F, q⁵ is 5, T3′ is 2′-F, q⁶ is 1, B4′ is 2′-OMe, and q⁷ is 1. The RNAi agent also comprises a 5′-P.

[0483] In one embodiment, B1 is 2′-OMe or 2′-F, n¹ is 8, T1 is 2′F, n² is 3, B2 is 2′-OMe, n³ is 7, n⁴ is 0, B3 is 2′OMe, n⁵ is 3, B1′ is 2′-OMe or 2′-F, q¹ is 9, T1′ is 2′-F, q² is 1, B2′ is 2′-OMe or 2′-F, q³ is 4, T2′ is 2′-F, q⁴ is 2, B3′ is 2′-OMe or 2′-F, q⁵ is 5, T3′ is 2′-F, q⁶ is 1, B4′ is 2′-OMe, and q⁷ is 1. The RNAi agent also comprises a 5′-VP. The 5′-VP may be 5′-E-VP, 5′-Z-VP, or combination thereof.

[0484] In one embodiment, B1 is 2′-OMe or 2′-F, n¹ is 8, T1 is 2′F, n² is 3, B2 is 2′-OMe, n³ is 7, n⁴ is 0, B3 is 2′OMe, n⁵ is 3, B1′ is 2′-OMe or 2′-F, q¹ is 9, T1′ is 2′-F, q² is 1, B2′ is 2′-OMe or 2′-F, q³ is 4, T2′ is 2′-F, q⁴ is 2, B3′ is 2′-OMe or 2′-F, q⁵ is 5, T3′ is 2′-F, q⁶ is 1, B4′ is 2′-OMe, and q⁷ is 1. The RNAi agent also comprises a 5′-PS₂.

[0485] In one embodiment, B1 is 2′-OMe or 2′-F, n¹ is 8, T1 is 2′F, n² is 3, B2 is 2′-OMe, n³ is 7, n⁴ is 0, B3 is 2′OMe, n⁵ is 3, B1′ is 2′-OMe or 2′-F, q¹ is 9, T1′ is 2′-F, q² is 1, B2′ is 2′-OMe or 2′-F, q³ is 4, T2′ is 2′-F, q⁴ is 2, B3′ is 2′-OMe or 2′-F, q⁵ is 5, T3′ is 2′-F, q⁶ is 1, B4′ is 2′-OMe, and q⁷ is 1. The RNAi agent also comprises a 5′-deoxy-5′-C-malonyl.

[0486] In one embodiment, B1 is 2′-OMe or 2′-F, n¹ is 8, T1 is 2′F, n² is 3, B2 is 2′-OMe, n³ is 7, n⁴ is 0, B3 is 2′-OMe, n⁵ is 3, B1′ is 2′-OMe or 2′-F, q¹ is 9, T1′ is 2′-F, q² is 1, B2′ is 2′-OMe or 2′-F, q³ is 4, T2′ is 2′-F, q⁴ is 2, B3′ is 2′-OMe or 2′-F, q⁵ is 5, T3′ is 2′-F, q⁶ is 1, B4′ is 2′-OMe, and q⁷ is 1; with two phosphorothioate internucleotide linkage modifications within position 1-5 of the sense strand (counting from the 5′-end of the sense strand), and two phosphorothioate internucleotide linkage modifications at positions 1 and 2 and two phosphorothioate internucleotide linkage modifications within positions 18-23 of the antisense strand (counting from the 5′-end of the antisense strand). The RNAi agent also comprises a 5′-P.

[0487] In one embodiment, B1 is 2′-OMe or 2′-F, n¹ is 8, T1 is 2′F, n² is 3, B2 is 2′-OMe, n³ is 7, n⁴ is 0, B3 is 2′-OMe, n⁵ is 3, B1′ is 2′-OMe or 2′-F, q¹ is 9, T1′ is 2′-F, q² is 1, B2′ is 2′-OMe or 2′-F, q³ is 4, T2′ is 2′-F, q⁴ is 2, B3′ is 2′-OMe or 2′-F, q⁵ is 5, T3′ is 2′-F, q⁶ is 1, B4′ is 2′-OMe, and q⁷ is 1; with two phosphorothioate internucleotide linkage modifications within position 1-5 of the sense strand (counting from the 5′-end of the sense strand), and two phosphorothioate internucleotide linkage modifications at positions 1 and 2 and two phosphorothioate internucleotide linkage modifications within positions 18-23 of the antisense strand (counting from the 5′-end of the antisense strand). The RNAi agent also comprises a 5′-PS.

[0488] In one embodiment, B1 is 2′-OMe or 2′-F, n¹ is 8, T1 is 2′F, n² is 3, B2 is 2′-OMe, n³ is 7, n⁴ is 0, B3 is 2′-OMe, n⁵ is 3, B1′ is 2′-OMe or 2′-F, q¹ is 9, T1′ is 2′-F, q² is 1, B2′ is 2′-OMe or 2′-F, q³ is 4, T2′ is 2′-F, q⁴ is 2, B3′ is 2′-OMe or 2′-F, q⁵ is 5, T3′ is 2′-F, q⁶ is 1, B4′ is 2′-OMe, and q⁷ is 1; with two phosphorothioate internucleotide linkage modifications within position 1-5 of the sense strand (counting from the 5′-end of the sense strand), and two phosphorothioate internucleotide linkage modifications at positions 1 and 2 and two phosphorothioate internucleotide linkage modifications within positions 18-23 of the antisense strand (counting from the 5′-end of the antisense strand). The RNAi agent also comprises a 5′-VP. The 5′-VP may be 5′-E-VP, 5′-Z-VP, or combination thereof.

[0489] In one embodiment, B1 is 2′-OMe or 2′-F, n¹ is 8, T1 is 2′F, n² is 3, B2 is 2′-OMe, n³ is 7, n⁴ is 0, B3 is 2′-OMe, n⁵ is 3, B1′ is 2′-OMe or 2′-F, q¹ is 9, T1′ is 2′-F, q² is 1, B2′ is 2′-OMe or 2′-F, q³ is 4, T2′ is 2′-F, q⁴ is 2, B3′ is 2′-OMe or 2′-F, q⁵ is 5, T3′ is 2′-F, q⁶ is 1, B4′ is 2′-OMe, and q⁷ is 1; with two phosphorothioate internucleotide linkage modifications within position 1-5 of the sense strand (counting from the 5′-end of the sense strand), and two phosphorothioate internucleotide linkage modifications at positions 1 and 2 and two phosphorothioate internucleotide linkage modifications within positions 18-23 of the antisense strand (counting from the 5′-end of the antisense strand). The RNAi agent also comprises a 5′-PS₂.

[0490] In one embodiment, B1 is 2′-OMe or 2′-F, n¹ is 8, T1 is 2′F, n² is 3, B2 is 2′-OMe, n³ is 7, n⁴ is 0, B3 is 2′-OMe, n⁵ is 3, B1′ is 2′-OMe or 2′-F, q¹ is 9, T1′ is 2′-F, q² is 1, B2′ is 2′-OMe or 2′-F, q³ is 4, T2′ is 2′-F, q⁴ is 2, B3′ is 2′-OMe or 2′-F, q⁵ is 5, T3′ is 2′-F, q⁶ is 1, B4′ is 2′-OMe, and q⁷ is 1; with two phosphorothioate internucleotide linkage modifications within position 1-5 of the sense strand (counting from the 5′-end of the sense strand), and two phosphorothioate internucleotide linkage modifications at positions 1 and 2 and two phosphorothioate internucleotide linkage modifications within positions 18-23 of the antisense strand (counting from the 5′-end of the antisense strand). The RNAi agent also comprises a 5′-deoxy-5′-C-malonyl.

[0491] In one embodiment, B1 is 2′-OMe or 2′-F, n¹ is 8, T1 is 2′F, n² is 3, B2 is 2′-OMe, n³ is 7, n⁴ is 0, B3 is 2′-OMe, n⁵ is 3, B1′ is 2′-OMe or 2′-F, q¹ is 9, T1′ is 2′-F, q² is 1, B2′ is 2′-OMe or 2′-F, q³ is 4, q⁴ is 0, B3′ is 2′-OMe or 2′-F, q⁵ is 7, T3′ is 2′-F, q⁶ is 1, B4′ is 2′- OMe, and q⁷ is 1. The RNAi agent also comprises a 5′-P.

[0492] In one embodiment, B1 is 2′-OMe or 2′-F, n¹ is 8, T1 is 2′F, n² is 3, B2 is 2′-OMe, n³ is 7, n⁴ is 0, B3 is 2′-OMe, n⁵ is 3, B1′ is 2′-OMe or 2′-F, q¹ is 9, T1′ is 2′-F, q² is 1, B2′ is 2′-OMe or 2′-F, q³ is 4, q⁴ is 0, B3′ is 2′-OMe or 2′-F, q⁵ is 7, T3′ is 2′-F, q⁶ is 1, B4′ is 2′- OMe, and q⁷ is 1. The dsRNA agent also comprises a 5′-PS.

[0493] In one embodiment, B1 is 2′-OMe or 2′-F, n¹ is 8, T1 is 2′F, n² is 3, B2 is 2′-OMe, n³ is 7, n⁴ is 0, B3 is 2′-OMe, n⁵ is 3, B1′ is 2′-OMe or 2′-F, q¹ is 9, T1′ is 2′-F, q² is 1, B2′ is 2′-OMe or 2′-F, q³ is 4, q⁴ is 0, B3′ is 2′-OMe or 2′-F, q⁵ is 7, T3′ is 2′-F, q⁶ is 1, B4′ is 2′- OMe, and q⁷ is 1. The RNAi agent also comprises a 5′-VP. The 5′-VP may be 5′-E-VP, 5′-Z-VP, or combination thereof.

[0494] In one embodiment, B1 is 2′-OMe or 2′-F, n¹ is 8, T1 is 2′F, n² is 3, B2 is 2′-OMe, n³ is 7, n⁴ is 0, B3 is 2′-OMe, n⁵ is 3, B1′ is 2′-OMe or 2′-F, q¹ is 9, T1′ is 2′-F, q² is 1, B2′ is 2′-OMe or 2′-F, q³ is 4, q⁴ is 0, B3′ is 2′-OMe or 2′-F, q⁵ is 7, T3′ is 2′-F, q⁶ is 1, B4′ is 2′- OMe, and q⁷ is 1. The RNAi agent also comprises a 5′-PS₂.

[0495] In one embodiment, B1 is 2′-OMe or 2′-F, n¹ is 8, T1 is 2′F, n² is 3, B2 is 2′-OMe, n³ is 7, n⁴ is 0, B3 is 2′-OMe, n⁵ is 3, B1′ is 2′-OMe or 2′-F, q¹ is 9, T1′ is 2′-F, q² is 1, B2′ is 2′-OMe or 2′-F, q³ is 4, q⁴ is 0, B3′ is 2′-OMe or 2′-F, q⁵ is 7, T3′ is 2′-F, q⁶ is 1, B4′ is 2′- OMe, and q⁷ is 1. The RNAi agent also comprises a 5′-deoxy-5′-C-malonyl.

[0496] In one embodiment, B1 is 2′-OMe or 2′-F, n¹ is 8, T1 is 2′F, n² is 3, B2 is 2′-OMe, n³ is 7, n⁴ is 0, B3 is 2′-OMe, n⁵ is 3, B1′ is 2′-OMe or 2′-F, q¹ is 9, T1′ is 2′-F, q² is 1, B2′ is 2′-OMe or 2′-F, q³ is 4, q⁴ is 0, B3′ is 2′-OMe or 2′-F, q⁵ is 7, T3′ is 2′-F, q⁶ is 1, B4′ is 2′- OMe, and q⁷ is 1; with two phosphorothioate internucleotide linkage modifications within position 1-5 of the sense strand (counting from the 5′-end), and two phosphorothioate internucleotide linkage modifications at positions 1 and 2 and two phosphorothioate internucleotide linkage modifications within positions 18-23 of the antisense strand (counting from the 5′-end). The RNAi agent also comprises a 5′-P.

[0497] In one embodiment, B1 is 2′-OMe or 2′-F, n¹ is 8, T1 is 2′F, n² is 3, B2 is 2′-OMe, n³ is 7, n⁴ is 0, B3 is 2′-OMe, n⁵ is 3, B1′ is 2′-OMe or 2′-F, q¹ is 9, T1′ is 2′-F, q² is 1, B2′ is 2′-OMe or 2′-F, q³ is 4, q⁴ is 0, B3′ is 2′-OMe or 2′-F, q⁵ is 7, T3′ is 2′-F, q⁶ is 1, B4′ is 2′- OMe, and q⁷ is 1; with two phosphorothioate internucleotide linkage modifications within position 1-5 of the sense strand (counting from the 5′-end), and two phosphorothioate internucleotide linkage modifications at positions 1 and 2 and two phosphorothioate internucleotide linkage modifications within positions 18-23 of the antisense strand (counting from the 5′-end). The RNAi agent also comprises a 5′-PS.

[0498] In one embodiment, B1 is 2′-OMe or 2′-F, n¹ is 8, T1 is 2′F, n² is 3, B2 is 2′-OMe, n³ is 7, n⁴ is 0, B3 is 2′-OMe, n⁵ is 3, B1′ is 2′-OMe or 2′-F, q¹ is 9, T1′ is 2′-F, q² is 1, B2′ is 2′-OMe or 2′-F, q³ is 4, q⁴ is 0, B3′ is 2′-OMe or 2′-F, q⁵ is 7, T3′ is 2′-F, q⁶ is 1, B4′ is 2′- OMe, and q⁷ is 1; with two phosphorothioate internucleotide linkage modifications within position 1-5 of the sense strand (counting from the 5′-end), and two phosphorothioate internucleotide linkage modifications at positions 1 and 2 and two phosphorothioate internucleotide linkage modifications within positions 18-23 of the antisense strand (counting from the 5′-end). The RNAi agent also comprises a 5′-VP. The 5′-VP may be 5′-E-VP, 5′-Z-VP, or combination thereof.

[0499] In one embodiment, B1 is 2′-OMe or 2′-F, n¹ is 8, T1 is 2′F, n² is 3, B2 is 2′-OMe, n³ is 7, n⁴ is 0, B3 is 2′-OMe, n⁵ is 3, B1′ is 2′-OMe or 2′-F, q¹ is 9, T1′ is 2′-F, q² is 1, B2′ is 2′-OMe or 2′-F, q³ is 4, q⁴ is 0, B3′ is 2′-OMe or 2′-F, q⁵ is 7, T3′ is 2′-F, q⁶ is 1, B4′ is 2′- OMe, and q⁷ is 1; with two phosphorothioate internucleotide linkage modifications within position 1-5 of the sense strand (counting from the 5′-end), and two phosphorothioate internucleotide linkage modifications at positions 1 and 2 and two phosphorothioate internucleotide linkage modifications within positions 18-23 of the antisense strand (counting from the 5′-end). The RNAi agent also comprises a 5′-PS₂.

[0500] In one embodiment, B1 is 2′-OMe or 2′-F, n¹ is 8, T1 is 2′F, n² is 3, B2 is 2′-OMe, n³ is 7, n⁴ is 0, B3 is 2′-OMe, n⁵ is 3, B1′ is 2′-OMe or 2′-F, q¹ is 9, T1′ is 2′-F, q² is 1, B2′ is 2′-OMe or 2′-F, q³ is 4, q⁴ is 0, B3′ is 2′-OMe or 2′-F, q⁵ is 7, T3′ is 2′-F, q⁶ is 1, B4′ is 2′- OMe, and q⁷ is 1; with two phosphorothioate internucleotide linkage modifications within position 1-5 of the sense strand (counting from the 5′-end), and two phosphorothioate internucleotide linkage modifications at positions 1 and 2 and two phosphorothioate internucleotide linkage modifications within positions 18-23 of the antisense strand (counting from the 5′-end). The RNAi agent also comprises a 5′-deoxy-5′-C-malonyl.

[0501] In one embodiment, B1 is 2′-OMe or 2′-F, n¹ is 8, T1 is 2′F, n² is 3, B2 is 2′-OMe, n³ is 7, n⁴ is 0, B3 is 2′OMe, n⁵ is 3, B1′ is 2′-OMe or 2′-F, q¹ is 9, T1′ is 2′-F, q² is 1, B2′ is 2′-OMe or 2′-F, q³ is 4, T2′ is 2′-F, q⁴ is 2, B3′ is 2′-OMe or 2′-F, q⁵ is 5, T3′ is 2′-F, q⁶ is 1, B4′ is 2′-F, and q⁷ is 1. The RNAi agent also comprises a 5′-P.

[0502] In one embodiment, B1 is 2′-OMe or 2′-F, n¹ is 8, T1 is 2′F, n² is 3, B2 is 2′-OMe, n³ is 7, n⁴ is 0, B3 is 2′OMe, n⁵ is 3, B1′ is 2′-OMe or 2′-F, q¹ is 9, T1′ is 2′-F, q² is 1, B2′ is 2′-OMe or 2′-F, q³ is 4, T2′ is 2′-F, q⁴ is 2, B3′ is 2′-OMe or 2′-F, q⁵ is 5, T3′ is 2′-F, q⁶ is 1, B4′ is 2′-F, and q⁷ is 1. The RNAi agent also comprises a 5′-PS.

[0503] In one embodiment, B1 is 2′-OMe or 2′-F, n¹ is 8, T1 is 2′F, n² is 3, B2 is 2′-OMe, n³ is 7, n⁴ is 0, B3 is 2′OMe, n⁵ is 3, B1′ is 2′-OMe or 2′-F, q¹ is 9, T1′ is 2′-F, q² is 1, B2′ is 2′-OMe or 2′-F, q³ is 4, T2′ is 2′-F, q⁴ is 2, B3′ is 2′-OMe or 2′-F, q⁵ is 5, T3′ is 2′-F, q⁶ is 1, B4′ is 2′-F, and q⁷ is 1. The RNAi agent also comprises a 5′-VP. The 5′-VP may be 5′-E-VP, 5′-Z-VP, or combination thereof.

[0504] In one embodiment, B1 is 2′-OMe or 2′-F, n¹ is 8, T1 is 2′F, n² is 3, B2 is 2′-OMe, n³ is 7, n⁴ is 0, B3 is 2′OMe, n⁵ is 3, B1′ is 2′-OMe or 2′-F, q¹ is 9, T1′ is 2′-F, q² is 1, B2′ is 2′-OMe or 2′-F, q³ is 4, T2′ is 2′-F, q⁴ is 2, B3′ is 2′-OMe or 2′-F, q⁵ is 5, T3′ is 2′-F, q⁶ is 1, B4′ is 2′-F, and q⁷ is 1. The dsRNAi RNA agent also comprises a 5′-PS₂.

[0505] In one embodiment, B1 is 2′-OMe or 2′-F, n¹ is 8, T1 is 2′F, n² is 3, B2 is 2′-OMe, n³ is 7, n⁴ is 0, B3 is 2′OMe, n⁵ is 3, B1′ is 2′-OMe or 2′-F, q¹ is 9, T1′ is 2′-F, q² is 1, B2′ is 2′-OMe or 2′-F, q³ is 4, T2′ is 2′-F, q⁴ is 2, B3′ is 2′-OMe or 2′-F, q⁵ is 5, T3′ is 2′-F, q⁶ is 1, B4′ is 2′-F, and q⁷ is 1. The RNAi agent also comprises a 5′-deoxy-5′-C-malonyl.

[0506] In one embodiment, B1 is 2′-OMe or 2′-F, n¹ is 8, T1 is 2′F, n² is 3, B2 is 2′-OMe, n³ is 7, n⁴ is 0, B3 is 2′-OMe, n⁵ is 3, B1′ is 2′-OMe or 2′-F, q¹ is 9, T1′ is 2′-F, q² is 1, B2′ is 2′-OMe or 2′-F, q³ is 4, T2′ is 2′-F, q⁴ is 2, B3′ is 2′-OMe or 2′-F, q⁵ is 5, T3′ is 2′-F, q⁶ is 1, B4′ is 2′-F, and q⁷ is 1; with two phosphorothioate internucleotide linkage modifications within position 1-5 of the sense strand (counting from the 5′-end of the sense strand), and two phosphorothioate internucleotide linkage modifications at positions 1 and 2 and two phosphorothioate internucleotide linkage modifications within positions 18-23 of the antisense strand (counting from the 5′-end of the antisense strand). The RNAi agent also comprises a 5′-P.

[0507] In one embodiment, B1 is 2′-OMe or 2′-F, n¹ is 8, T1 is 2′F, n² is 3, B2 is 2′-OMe, n³ is 7, n⁴ is 0, B3 is 2′-OMe, n⁵ is 3, B1′ is 2′-OMe or 2′-F, q¹ is 9, T1′ is 2′-F, q² is 1, B2′ is 2′-OMe or 2′-F, q³ is 4, T2′ is 2′-F, q⁴ is 2, B3′ is 2′-OMe or 2′-F, q⁵ is 5, T3′ is 2′-F, q⁶ is 1, B4′ is 2′-F, and q⁷ is 1; with two phosphorothioate internucleotide linkage modifications within position 1-5 of the sense strand (counting from the 5′-end of the sense strand), and two phosphorothioate internucleotide linkage modifications at positions 1 and 2 and two phosphorothioate internucleotide linkage modifications within positions 18-23 of the antisense strand (counting from the 5′-end of the antisense strand). The RNAi agent also comprises a 5′-PS.

[0508] In one embodiment, B1 is 2′-OMe or 2′-F, n¹ is 8, T1 is 2′F, n² is 3, B2 is 2′-OMe, n³ is 7, n⁴ is 0, B3 is 2′-OMe, n⁵ is 3, B1′ is 2′-OMe or 2′-F, q¹ is 9, T1′ is 2′-F, q² is 1, B2′ is 2′-OMe or 2′-F, q³ is 4, T2′ is 2′-F, q⁴ is 2, B3′ is 2′-OMe or 2′-F, q⁵ is 5, T3′ is 2′-F, q⁶ is 1, B4′ is 2′-F, and q⁷ is 1; with two phosphorothioate internucleotide linkage modifications within position 1-5 of the sense strand (counting from the 5′-end of the sense strand), and two phosphorothioate internucleotide linkage modifications at positions 1 and 2 and two phosphorothioate internucleotide linkage modifications within positions 18-23 of the antisense strand (counting from the 5′-end of the antisense strand). The RNAi agent also comprises a 5′-VP. The 5′-VP may be 5′-E-VP, 5′-Z-VP, or combination thereof.

[0509] In one embodiment, B1 is 2′-OMe or 2′-F, n¹ is 8, T1 is 2′F, n² is 3, B2 is 2′-OMe, n³ is 7, n⁴ is 0, B3 is 2′-OMe, n⁵ is 3, B1′ is 2′-OMe or 2′-F, q¹ is 9, T1′ is 2′-F, q² is 1, B2′ is 2′-OMe or 2′-F, q³ is 4, T2′ is 2′-F, q⁴ is 2, B3′ is 2′-OMe or 2′-F, q⁵ is 5, T3′ is 2′-F, q⁶ is 1, B4′ is 2′-F, and q⁷ is 1; with two phosphorothioate internucleotide linkage modifications within position 1-5 of the sense strand (counting from the 5′-end of the sense strand), and two phosphorothioate internucleotide linkage modifications at positions 1 and 2 and two phosphorothioate internucleotide linkage modifications within positions 18-23 of the antisense strand (counting from the 5′-end of the antisense strand). The RNAi agent also comprises a 5′-PS₂.

[0510] In one embodiment, B1 is 2′-OMe or 2′-F, n¹ is 8, T1 is 2′F, n² is 3, B2 is 2′-OMe, n³ is 7, n⁴ is 0, B3 is 2′-OMe, n⁵ is 3, B1′ is 2′-OMe or 2′-F, q¹ is 9, T1′ is 2′-F, q² is 1, B2′ is 2′-OMe or 2′-F, q³ is 4, T2′ is 2′-F, q⁴ is 2, B3′ is 2′-OMe or 2′-F, q⁵ is 5, T3′ is 2′-F, q⁶ is 1, B4′ is 2′-F, and q⁷ is 1; with two phosphorothioate internucleotide linkage modifications within position 1-5 of the sense strand (counting from the 5′-end of the sense strand), and two phosphorothioate internucleotide linkage modifications at positions 1 and 2 and two phosphorothioate internucleotide linkage modifications within positions 18-23 of the antisense strand (counting from the 5′-end of the antisense strand). The RNAi agent also comprises a 5′-deoxy-5′-C-malonyl.

[0511] In one embodiment, B1 is 2′-OMe or 2′-F, n¹ is 8, T1 is 2′F, n² is 3, B2 is 2′-OMe, n³ is 7, n⁴ is 0, B3 is 2′-OMe, n⁵ is 3, B1′ is 2′-OMe or 2′-F, q¹ is 9, T1′ is 2′-F, q² is 1, B2′ is 2′-OMe or 2′-F, q³ is 4, q⁴ is 0, B3′ is 2′-OMe or 2′-F, q⁵ is 7, T3′ is 2′-F, q⁶ is 1, B4′ is 2′-F, and q⁷ is 1. The RNAi agent also comprises a 5′-P.

[0512] In one embodiment, B1 is 2′-OMe or 2′-F, n¹ is 8, T1 is 2′F, n² is 3, B2 is 2′-OMe, n³ is 7, n⁴ is 0, B3 is 2′-OMe, n⁵ is 3, B1′ is 2′-OMe or 2′-F, q¹ is 9, T1′ is 2′-F, q² is 1, B2′ is 2′-OMe or 2′-F, q³ is 4, q⁴ is 0, B3′ is 2′-OMe or 2′-F, q⁵ is 7, T3′ is 2′-F, q⁶ is 1, B4′ is 2′-F, and q⁷ is 1. The RNAi agent also comprises a 5′-PS.

[0513] In one embodiment, B1 is 2′-OMe or 2′-F, n¹ is 8, T1 is 2′F, n² is 3, B2 is 2′-OMe, n³ is 7, n⁴ is 0, B3 is 2′-OMe, n⁵ is 3, B1′ is 2′-OMe or 2′-F, q¹ is 9, T1′ is 2′-F, q² is 1, B2′ is 2′-OMe or 2′-F, q³ is 4, q⁴ is 0, B3′ is 2′-OMe or 2′-F, q⁵ is 7, T3′ is 2′-F, q⁶ is 1, B4′ is 2′-F, and q⁷ is 1. The RNAi agent also comprises a 5′-VP. The 5′-VP may be 5′-E-VP, 5′-Z-VP, or combination thereof.

[0514] In one embodiment, B1 is 2′-OMe or 2′-F, n¹ is 8, T1 is 2′F, n² is 3, B2 is 2′-OMe, n³ is 7, n⁴ is 0, B3 is 2′-OMe, n⁵ is 3, B1′ is 2′-OMe or 2′-F, q¹ is 9, T1′ is 2′-F, q² is 1, B2′ is 2′-OMe or 2′-F, q³ is 4, q⁴ is 0, B3′ is 2′-OMe or 2′-F, q⁵ is 7, T3′ is 2′-F, q⁶ is 1, B4′ is 2′-F, and q⁷ is 1. The RNAi agent also comprises a 5′-PS₂.

[0515] In one embodiment, B1 is 2′-OMe or 2′-F, n¹ is 8, T1 is 2′F, n² is 3, B2 is 2′-OMe, n³ is 7, n⁴ is 0, B3 is 2′-OMe, n⁵ is 3, B1′ is 2′-OMe or 2′-F, q¹ is 9, T1′ is 2′-F, q² is 1, B2′ is 2′-OMe or 2′-F, q³ is 4, q⁴ is 0, B3′ is 2′-OMe or 2′-F, q⁵ is 7, T3′ is 2′-F, q⁶ is 1, B4′ is 2′-F, and q⁷ is 1. The RNAi agent also comprises a 5′-deoxy-5′-C-malonyl.

[0516] In one embodiment, B1 is 2′-OMe or 2′-F, n¹ is 8, T1 is 2′F, n² is 3, B2 is 2′-OMe, n³ is 7, n⁴ is 0, B3 is 2′-OMe, n⁵ is 3, B1′ is 2′-OMe or 2′-F, q¹ is 9, T1′ is 2′-F, q² is 1, B2′ is 2′-OMe or 2′-F, q³ is 4, q⁴ is 0, B3′ is 2′-OMe or 2′-F, q⁵ is 7, T3′ is 2′-F, q⁶ is 1, B4′ is 2′-F, and q⁷ is 1; with two phosphorothioate internucleotide linkage modifications within position 1-5 of the sense strand (counting from the 5′-end of the sense strand), and two phosphorothioate internucleotide linkage modifications at positions 1 and 2 and two phosphorothioate internucleotide linkage modifications within positions 18-23 of the antisense strand (counting from the 5′-end of the antisense strand). The RNAi agent also comprises a 5′-P. In one embodiment, B1 is 2′-OMe or 2′-F, n¹ is 8, T1 is 2′F, n² is 3, B2 is 2′-OMe, n³ is 7, n⁴ is 0, B3 is 2′-OMe, n⁵ is 3, B1′ is 2′-OMe or 2′-F, q¹ is 9, T1′ is 2′-F, q² is 1, B2′ is 2′-OMe or 2′-F, q³ is 4, q⁴ is 0, B3′ is 2′-OMe or 2′-F, q⁵ is 7, T3′ is 2′-F, q⁶ is 1, B4′ is 2′-F, and q⁷ is 1; with two phosphorothioate internucleotide linkage modifications within position 1-5 of the sense strand (counting from the 5′-end of the sense strand), and two phosphorothioate internucleotide linkage modifications at positions 1 and 2 and two phosphorothioate internucleotide linkage modifications within positions 18-23 of the antisense strand (counting from the 5′-end of the antisense strand). The RNAi agent also comprises a 5′-PS.

[0517] In one embodiment, B1 is 2′-OMe or 2′-F, n¹ is 8, T1 is 2′F, n² is 3, B2 is 2′-OMe, n³ is 7, n⁴ is 0, B3 is 2′-OMe, n⁵ is 3, B1′ is 2′-OMe or 2′-F, q¹ is 9, T1′ is 2′-F, q² is 1, B2′ is 2′-OMe or 2′-F, q³ is 4, q⁴ is 0, B3′ is 2′-OMe or 2′-F, q⁵ is 7, T3′ is 2′-F, q⁶ is 1, B4′ is 2′-F, and q⁷ is 1; with two phosphorothioate internucleotide linkage modifications within position 1-5 of the sense strand (counting from the 5′-end of the sense strand), and two phosphorothioate internucleotide linkage modifications at positions 1 and 2 and two phosphorothioate internucleotide linkage modifications within positions 18-23 of the antisense strand (counting from the 5′-end of the antisense strand). The RNAi agent also comprises a 5′-VP. The 5′-VP may be 5′-E-VP, 5′-Z-VP, or combination thereof.

[0518] In one embodiment, B1 is 2′-OMe or 2′-F, n¹ is 8, T1 is 2′F, n² is 3, B2 is 2′-OMe, n³ is 7, n⁴ is 0, B3 is 2′-OMe, n⁵ is 3, B1′ is 2′-OMe or 2′-F, q¹ is 9, T1′ is 2′-F, q² is 1, B2′ is 2′-OMe or 2′-F, q³ is 4, q⁴ is 0, B3′ is 2′-OMe or 2′-F, q⁵ is 7, T3′ is 2′-F, q⁶ is 1, B4′ is 2′-F, and q⁷ is 1; with two phosphorothioate internucleotide linkage modifications within position 1-5 of the sense strand (counting from the 5′-end of the sense strand), and two phosphorothioate internucleotide linkage modifications at positions 1 and 2 and two phosphorothioate internucleotide linkage modifications within positions 18-23 of the antisense strand (counting from the 5′-end of the antisense strand). The RNAi agent also comprises a 5′-PS₂.

[0519] In one embodiment, B1 is 2′-OMe or 2′-F, n¹ is 8, T1 is 2′F, n² is 3, B2 is 2′-OMe, n³ is 7, n⁴ is 0, B3 is 2′-OMe, n⁵ is 3, B1′ is 2′-OMe or 2′-F, q¹ is 9, T1′ is 2′-F, q² is 1, B2′ is 2′-OMe or 2′-F, q³ is 4, q⁴ is 0, B3′ is 2′-OMe or 2′-F, q⁵ is 7, T3′ is 2′-F, q⁶ is 1, B4′ is 2′-F, and q⁷ is 1; with two phosphorothioate internucleotide linkage modifications within position 1-5 of the sense strand (counting from the 5′-end of the sense strand), and two phosphorothioate internucleotide linkage modifications at positions 1 and 2 and two phosphorothioate internucleotide linkage modifications within positions 18-23 of the antisense strand (counting from the 5′-end of the antisense strand). The RNAi agent also comprises a 5′-deoxy-5′-C-malonyl.

[0520] In one embodiment, B1 is 2′-OMe or 2′-F, n¹ is 8, T1 is 2′F, n² is 3, B2 is 2′-OMe, n³ is 7, n⁴ is 0, B3 is 2′-OMe, n⁵ is 3, B1′ is 2′-OMe or 2′-F, q¹ is 9, T1′ is 2′-F, q² is 1, B2′ is 2′-OMe or 2′-F, q³ is 4, T2′ is 2′-F, q⁴ is 2, B3′ is 2′-OMe or 2′-F, q⁵ is 5, T3′ is 2′-F, q⁶ is 1, B4′ is 2′-OMe, and q⁷ is 1; with two phosphorothioate internucleotide linkage modifications within position 1-5 of the sense strand (counting from the 5′-end of the sense strand), and two phosphorothioate internucleotide linkage modifications at positions 1 and 2 and two phosphorothioate internucleotide linkage modifications within positions 18-23 of the antisense strand (counting from the 5′-end of the antisense strand). The RNAi agent also comprises a 5′-P and a targeting ligand. In one embodiment, the 5′-P is at the 5′-end of the antisense strand, and the targeting ligand is at the 3′-end of the sense strand.

[0521] In one embodiment, B1 is 2′-OMe or 2′-F, n¹ is 8, T1 is 2′F, n² is 3, B2 is 2′-OMe, n³ is 7, n⁴ is 0, B3 is 2′-OMe, n⁵ is 3, B1′ is 2′-OMe or 2′-F, q¹ is 9, T1′ is 2′-F, q² is 1, B2′ is 2′-OMe or 2′-F, q³ is 4, T2′ is 2′-F, q⁴ is 2, B3′ is 2′-OMe or 2′-F, q⁵ is 5, T3′ is 2′-F, q⁶ is 1, B4′ is 2′-OMe, and q⁷ is 1; with two phosphorothioate internucleotide linkage modifications within position 1-5 of the sense strand (counting from the 5′-end of the sense strand), and two phosphorothioate internucleotide linkage modifications at positions 1 and 2 and two phosphorothioate internucleotide linkage modifications within positions 18-23 of the antisense strand (counting from the 5′-end of the antisense strand). The RNAi agent also comprises a 5′-PS and a targeting ligand. In one embodiment, the 5′-PS is at the 5′-end of the antisense strand, and the targeting ligand is at the 3′-end of the sense strand.

[0522] In one embodiment, B1 is 2′-OMe or 2′-F, n¹ is 8, T1 is 2′F, n² is 3, B2 is 2′-OMe, n³ is 7, n⁴ is 0, B3 is 2′-OMe, n⁵ is 3, B1′ is 2′-OMe or 2′-F, q¹ is 9, T1′ is 2′-F, q² is 1, B2′ is 2′-OMe or 2′-F, q³ is 4, T2′ is 2′-F, q⁴ is 2, B3′ is 2′-OMe or 2′-F, q⁵ is 5, T3′ is 2′-F, q⁶ is 1, B4′ is 2′-OMe, and q⁷ is 1; with two phosphorothioate internucleotide linkage modifications within position 1-5 of the sense strand (counting from the 5′-end of the sense strand), and two phosphorothioate internucleotide linkage modifications at positions 1 and 2 and two phosphorothioate internucleotide linkage modifications within positions 18-23 of the antisense strand (counting from the 5′-end of the antisense strand). The RNAi agent also comprises a 5′-VP (e.g., a 5′-E-VP, 5′-Z-VP, or combination thereof), and a targeting ligand. In one embodiment, the 5′-VP is at the 5′-end of the antisense strand, and the targeting ligand is at the 3′-end of the sense strand.

[0523] In one embodiment, B1 is 2′-OMe or 2′-F, n¹ is 8, T1 is 2′F, n² is 3, B2 is 2′-OMe, n³ is 7, n⁴ is 0, B3 is 2′-OMe, n⁵ is 3, B1′ is 2′-OMe or 2′-F, q¹ is 9, T1′ is 2′-F, q² is 1, B2′ is 2′-OMe or 2′-F, q³ is 4, T2′ is 2′-F, q⁴ is 2, B3′ is 2′-OMe or 2′-F, q⁵ is 5, T3′ is 2′-F, q⁶ is 1, B4′ is 2′-OMe, and q⁷ is 1; with two phosphorothioate internucleotide linkage modifications within position 1-5 of the sense strand (counting from the 5′-end of the sense strand), and two phosphorothioate internucleotide linkage modifications at positions 1 and 2 and two phosphorothioate internucleotide linkage modifications within positions 18-23 of the antisense strand (counting from the 5′-end of the antisense strand). The RNAi agent also comprises a 5′-PS₂ and a targeting ligand. In one embodiment, the 5′-PS₂ is at the 5′-end of the antisense strand, and the targeting ligand is at the 3′-end of the sense strand.

[0524] In one embodiment, B1 is 2′-OMe or 2′-F, n¹ is 8, T1 is 2′F, n² is 3, B2 is 2′-OMe, n³ is 7, n⁴ is 0, B3 is 2′-OMe, n⁵ is 3, B1′ is 2′-OMe or 2′-F, q¹ is 9, T1′ is 2′-F, q² is 1, B2′ is 2′-OMe or 2′-F, q³ is 4, T2′ is 2′-F, q⁴ is 2, B3′ is 2′-OMe or 2′-F, q⁵ is 5, T3′ is 2′-F, q⁶ is 1, B4′ is 2′-OMe, and q⁷ is 1; with two phosphorothioate internucleotide linkage modifications within position 1-5 of the sense strand (counting from the 5′-end of the sense strand), and two phosphorothioate internucleotide linkage modifications at positions 1 and 2 and two phosphorothioate internucleotide linkage modifications within positions 18-23 of the antisense strand (counting from the 5′-end of the antisense strand). The RNAi agent also comprises a 5′-deoxy-5′-C-malonyl and a targeting ligand. In one embodiment, the 5′-deoxy-5′-C-malonyl is at the 5′-end of the antisense strand, and the targeting ligand is at the 3′-end of the sense strand.

[0525] In one embodiment, B1 is 2′-OMe or 2′-F, n¹ is 8, T1 is 2′F, n² is 3, B2 is 2′-OMe, n³ is 7, n⁴ is 0, B3 is 2′-OMe, n⁵ is 3, B1′ is 2′-OMe or 2′-F, q¹ is 9, T1′ is 2′-F, q² is 1, B2′ is 2′-OMe or 2′-F, q³ is 4, q⁴ is 0, B3′ is 2′-OMe or 2′-F, q⁵ is 7, T3′ is 2′-F, q⁶ is 1, B4′ is 2′- OMe, and q⁷ is 1; with two phosphorothioate internucleotide linkage modifications within position 1-5 of the sense strand (counting from the 5′-end), and two phosphorothioate internucleotide linkage modifications at positions 1 and 2 and two phosphorothioate internucleotide linkage modifications within positions 18-23 of the antisense strand (counting from the 5′-end). The RNAi agent also comprises a 5′-P and a targeting ligand. In one embodiment, the 5′-P is at the 5′-end of the antisense strand, and the targeting ligand is at the 3′-end of the sense strand.

[0526] In one embodiment, B1 is 2′-OMe or 2′-F, n¹ is 8, T1 is 2′F, n² is 3, B2 is 2′-OMe, n³ is 7, n⁴ is 0, B3 is 2′-OMe, n⁵ is 3, B1′ is 2′-OMe or 2′-F, q¹ is 9, T1′ is 2′-F, q² is 1, B2′ is 2′-OMe or 2′-F, q³ is 4, q⁴ is 0, B3′ is 2′-OMe or 2′-F, q⁵ is 7, T3′ is 2′-F, q⁶ is 1, B4′ is 2′- OMe, and q⁷ is 1; with two phosphorothioate internucleotide linkage modifications within position 1-5 of the sense strand (counting from the 5′-end), and two phosphorothioate internucleotide linkage modifications at positions 1 and 2 and two phosphorothioate internucleotide linkage modifications within positions 18-23 of the antisense strand (counting from the 5′-end). The RNAi agent also comprises a 5′-PS and a targeting ligand. In one embodiment, the 5′-PS is at the 5′-end of the antisense strand, and the targeting ligand is at the 3′-end of the sense strand.

[0527] In one embodiment, B1 is 2′-OMe or 2′-F, n¹ is 8, T1 is 2′F, n² is 3, B2 is 2′-OMe, n³ is 7, n⁴ is 0, B3 is 2′-OMe, n⁵ is 3, B1′ is 2′-OMe or 2′-F, q¹ is 9, T1′ is 2′-F, q² is 1, B2′ is 2′-OMe or 2′-F, q³ is 4, q⁴ is 0, B3′ is 2′-OMe or 2′-F, q⁵ is 7, T3′ is 2′-F, q⁶ is 1, B4′ is 2′- OMe, and q⁷ is 1; with two phosphorothioate internucleotide linkage modifications within position 1-5 of the sense strand (counting from the 5′-end), and two phosphorothioate internucleotide linkage modifications at positions 1 and 2 and two phosphorothioate internucleotide linkage modifications within positions 18-23 of the antisense strand (counting from the 5′-end). The RNAi agent also comprises a 5′-VP (e.g., a 5′-E-VP, 5′-Z-VP, or combination thereof) and a targeting ligand. In one embodiment, the 5′-VP is at the 5′-end of the antisense strand, and the targeting ligand is at the 3′-end of the sense strand.

[0528] In one embodiment, B1 is 2′-OMe or 2′-F, n¹ is 8, T1 is 2′F, n² is 3, B2 is 2′-OMe, n³ is 7, n⁴ is 0, B3 is 2′-OMe, n⁵ is 3, B1′ is 2′-OMe or 2′-F, q¹ is 9, T1′ is 2′-F, q² is 1, B2′ is 2′-OMe or 2′-F, q³ is 4, q⁴ is 0, B3′ is 2′-OMe or 2′-F, q⁵ is 7, T3′ is 2′-F, q⁶ is 1, B4′ is 2′- OMe, and q⁷ is 1; with two phosphorothioate internucleotide linkage modifications within position 1-5 of the sense strand (counting from the 5′-end), and two phosphorothioate internucleotide linkage modifications at positions 1 and 2 and two phosphorothioate internucleotide linkage modifications within positions 18-23 of the antisense strand (counting from the 5′-end). The RNAi agent also comprises a 5′-PS₂ and a targeting ligand. In one embodiment, the 5′-PS₂ is at the 5′-end of the antisense strand, and the targeting ligand is at the 3′-end of the sense strand. In one embodiment, B1 is 2′-OMe or 2′-F, n¹ is 8, T1 is 2′F, n² is 3, B2 is 2′-OMe, n³ is 7, n⁴ is 0, B3 is 2′-OMe, n⁵ is 3, B1′ is 2′-OMe or 2′-F, q¹ is 9, T1′ is 2′-F, q² is 1, B2′ is 2′-OMe or 2′-F, q³ is 4, q⁴ is 0, B3′ is 2′-OMe or 2′-F, q⁵ is 7, T3′ is 2′-F, q⁶ is 1, B4′ is 2′- OMe, and q⁷ is 1; with two phosphorothioate internucleotide linkage modifications within position 1-5 of the sense strand (counting from the 5′-end), and two phosphorothioate internucleotide linkage modifications at positions 1 and 2 and two phosphorothioate internucleotide linkage modifications within positions 18-23 of the antisense strand (counting from the 5′-end). The RNAi agent also comprises a 5′-deoxy-5′-C-malonyl and a targeting ligand. In one embodiment, the 5′-deoxy-5′-C-malonyl is at the 5′-end of the antisense strand, and the targeting ligand is at the 3′-end of the sense strand.

[0529] In one embodiment, B1 is 2′-OMe or 2′-F, n¹ is 8, T1 is 2′F, n² is 3, B2 is 2′-OMe, n³ is 7, n⁴ is 0, B3 is 2′-OMe, n⁵ is 3, B1′ is 2′-OMe or 2′-F, q¹ is 9, T1′ is 2′-F, q² is 1, B2′ is 2′-OMe or 2′-F, q³ is 4, T2′ is 2′-F, q⁴ is 2, B3′ is 2′-OMe or 2′-F, q⁵ is 5, T3′ is 2′-F, q⁶ is 1, B4′ is 2′-F, and q⁷ is 1; with two phosphorothioate internucleotide linkage modifications within position 1-5 of the sense strand (counting from the 5′-end of the sense strand), and two phosphorothioate internucleotide linkage modifications at positions 1 and 2 and two phosphorothioate internucleotide linkage modifications within positions 18-23 of the antisense strand (counting from the 5′-end of the antisense strand). The RNAi agent also comprises a 5′-P and a targeting ligand. In one embodiment, the 5′-P is at the 5′-end of the antisense strand, and the targeting ligand is at the 3′-end of the sense strand.

[0530] In one embodiment, B1 is 2′-OMe or 2′-F, n¹ is 8, T1 is 2′F, n² is 3, B2 is 2′-OMe, n³ is 7, n⁴ is 0, B3 is 2′-OMe, n⁵ is 3, B1′ is 2′-OMe or 2′-F, q¹ is 9, T1′ is 2′-F, q² is 1, B2′ is 2′-OMe or 2′-F, q³ is 4, T2′ is 2′-F, q⁴ is 2, B3′ is 2′-OMe or 2′-F, q⁵ is 5, T3′ is 2′-F, q⁶ is 1, B4′ is 2′-F, and q⁷ is 1; with two phosphorothioate internucleotide linkage modifications within position 1-5 of the sense strand (counting from the 5′-end of the sense strand), and two phosphorothioate internucleotide linkage modifications at positions 1 and 2 and two phosphorothioate internucleotide linkage modifications within positions 18-23 of the antisense strand (counting from the 5′-end of the antisense strand). The RNAi agent also comprises a 5′-PS and a targeting ligand. In one embodiment, the 5′-PS is at the 5′-end of the antisense strand, and the targeting ligand is at the 3′-end of the sense strand.

[0531] In one embodiment, B1 is 2′-OMe or 2′-F, n¹ is 8, T1 is 2′F, n² is 3, B2 is 2′-OMe, n³ is 7, n⁴ is 0, B3 is 2′-OMe, n⁵ is 3, B1′ is 2′-OMe or 2′-F, q¹ is 9, T1′ is 2′-F, q² is 1, B2′ is 2′-OMe or 2′-F, q³ is 4, T2′ is 2′-F, q⁴ is 2, B3′ is 2′-OMe or 2′-F, q⁵ is 5, T3′ is 2′-F, q⁶ is 1, B4′ is 2′-F, and q⁷ is 1; with two phosphorothioate internucleotide linkage modifications within position 1-5 of the sense strand (counting from the 5′-end of the sense strand), and two phosphorothioate internucleotide linkage modifications at positions 1 and 2 and two phosphorothioate internucleotide linkage modifications within positions 18-23 of the antisense strand (counting from the 5′-end of the antisense strand). The RNAi agent also comprises a 5′-VP (e.g., a 5′-E-VP, 5′-Z-VP, or combination thereof) and a targeting ligand. In one embodiment, the 5′-VP is at the 5′-end of the antisense strand, and the targeting ligand is at the 3′-end of the sense strand.

[0532] In one embodiment, B1 is 2′-OMe or 2′-F, n¹ is 8, T1 is 2′F, n² is 3, B2 is 2′-OMe, n³ is 7, n⁴ is 0, B3 is 2′-OMe, n⁵ is 3, B1′ is 2′-OMe or 2′-F, q¹ is 9, T1′ is 2′-F, q² is 1, B2′ is 2′-OMe or 2′-F, q³ is 4, T2′ is 2′-F, q⁴ is 2, B3′ is 2′-OMe or 2′-F, q⁵ is 5, T3′ is 2′-F, q⁶ is 1, B4′ is 2′-F, and q⁷ is 1; with two phosphorothioate internucleotide linkage modifications within position 1-5 of the sense strand (counting from the 5′-end of the sense strand), and two phosphorothioate internucleotide linkage modifications at positions 1 and 2 and two phosphorothioate internucleotide linkage modifications within positions 18-23 of the antisense strand (counting from the 5′-end of the antisense strand). The RNAi agent also comprises a 5′-PS₂ and a targeting ligand. In one embodiment, the 5′-PS₂ is at the 5′-end of the antisense strand, and the targeting ligand is at the 3′-end of the sense strand.

[0533] In one embodiment, B1 is 2′-OMe or 2′-F, n¹ is 8, T1 is 2′F, n² is 3, B2 is 2′-OMe, n³ is 7, n⁴ is 0, B3 is 2′-OMe, n⁵ is 3, B1′ is 2′-OMe or 2′-F, q¹ is 9, T1′ is 2′-F, q² is 1, B2′ is 2′-OMe or 2′-F, q³ is 4, T2′ is 2′-F, q⁴ is 2, B3′ is 2′-OMe or 2′-F, q⁵ is 5, T3′ is 2′-F, q⁶ is 1, B4′ is 2′-F, and q⁷ is 1; with two phosphorothioate internucleotide linkage modifications within position 1-5 of the sense strand (counting from the 5′-end of the sense strand), and two phosphorothioate internucleotide linkage modifications at positions 1 and 2 and two phosphorothioate internucleotide linkage modifications within positions 18-23 of the antisense strand (counting from the 5′-end of the antisense strand). The RNAi agent also comprises a 5′-deoxy-5′-C-malonyl and a targeting ligand. In one embodiment, the 5′-deoxy-5′-C-malonyl is at the 5′-end of the antisense strand, and the targeting ligand is at the 3′-end of the sense strand.

[0534] In one embodiment, B1 is 2′-OMe or 2′-F, n¹ is 8, T1 is 2′F, n² is 3, B2 is 2′-OMe, n³ is 7, n⁴ is 0, B3 is 2′-OMe, n⁵ is 3, B1′ is 2′-OMe or 2′-F, q¹ is 9, T1′ is 2′-F, q² is 1, B2′ is 2′-OMe or 2′-F, q³ is 4, q⁴ is 0, B3′ is 2′-OMe or 2′-F, q⁵ is 7, T3′ is 2′-F, q⁶ is 1, B4′ is 2′-F, and q⁷ is 1; with two phosphorothioate internucleotide linkage modifications within position 1-5 of the sense strand (counting from the 5′-end of the sense strand), and two phosphorothioate internucleotide linkage modifications at positions 1 and 2 and two phosphorothioate internucleotide linkage modifications within positions 18-23 of the antisense strand (counting from the 5′-end of the antisense strand). The RNAi agent also comprises a 5′-P and a targeting ligand. In one embodiment, the 5′-P is at the 5′-end of the antisense strand, and the targeting ligand is at the 3′-end of the sense strand.

[0535] In one embodiment, B1 is 2′-OMe or 2′-F, n¹ is 8, T1 is 2′F, n² is 3, B2 is 2′-OMe, n³ is 7, n⁴ is 0, B3 is 2′-OMe, n⁵ is 3, B1′ is 2′-OMe or 2′-F, q¹ is 9, T1′ is 2′-F, q² is 1, B2′ is 2′-OMe or 2′-F, q³ is 4, q⁴ is 0, B3′ is 2′-OMe or 2′-F, q⁵ is 7, T3′ is 2′-F, q⁶ is 1, B4′ is 2′-F, and q⁷ is 1; with two phosphorothioate internucleotide linkage modifications within position 1-5 of the sense strand (counting from the 5′-end of the sense strand), and two phosphorothioate internucleotide linkage modifications at positions 1 and 2 and two phosphorothioate internucleotide linkage modifications within positions 18-23 of the antisense strand (counting from the 5′-end of the antisense strand). The RNAi agent also comprises a 5′-PS and a targeting ligand. In one embodiment, the 5′-PS is at the 5′-end of the antisense strand, and the targeting ligand is at the 3′-end of the sense strand.

[0536] In one embodiment, B1 is 2′-OMe or 2′-F, n¹ is 8, T1 is 2′F, n² is 3, B2 is 2′-OMe, n³ is 7, n⁴ is 0, B3 is 2′-OMe, n⁵ is 3, B1′ is 2′-OMe or 2′-F, q¹ is 9, T1′ is 2′-F, q² is 1, B2′ is 2′-OMe or 2′-F, q³ is 4, q⁴ is 0, B3′ is 2′-OMe or 2′-F, q⁵ is 7, T3′ is 2′-F, q⁶ is 1, B4′ is 2′-F, and q⁷ is 1; with two phosphorothioate internucleotide linkage modifications within position 1-5 of the sense strand (counting from the 5′-end of the sense strand), and two phosphorothioate internucleotide linkage modifications at positions 1 and 2 and two phosphorothioate internucleotide linkage modifications within positions 18-23 of the antisense strand (counting from the 5′-end of the antisense strand). The RNAi agent also comprises a 5′-VP (e.g., a 5′-E-VP, 5′-Z-VP, or combination thereof) and a targeting ligand. In one embodiment, the 5′-VP is at the 5′-end of the antisense strand, and the targeting ligand is at the 3′-end of the sense strand.

[0537] In one embodiment, B1 is 2′-OMe or 2′-F, n¹ is 8, T1 is 2′F, n² is 3, B2 is 2′-OMe, n³ is 7, n⁴ is 0, B3 is 2′-OMe, n⁵ is 3, B1′ is 2′-OMe or 2′-F, q¹ is 9, T1′ is 2′-F, q² is 1, B2′ is 2′-OMe or 2′-F, q³ is 4, q⁴ is 0, B3′ is 2′-OMe or 2′-F, q⁵ is 7, T3′ is 2′-F, q⁶ is 1, B4′ is 2′-F, and q⁷ is 1; with two phosphorothioate internucleotide linkage modifications within position 1-5 of the sense strand (counting from the 5′-end of the sense strand), and two phosphorothioate internucleotide linkage modifications at positions 1 and 2 and two phosphorothioate internucleotide linkage modifications within positions 18-23 of the antisense strand (counting from the 5′-end of the antisense strand). The RNAi agent also comprises a 5′-PS₂ and a targeting ligand. In one embodiment, the 5′-PS₂ is at the 5′-end of the antisense strand, and the targeting ligand is at the 3′-end of the sense strand.

[0538] In one embodiment, B1 is 2′-OMe or 2′-F, n¹ is 8, T1 is 2′F, n² is 3, B2 is 2′-OMe, n³ is 7, n⁴ is 0, B3 is 2′-OMe, n⁵ is 3, B1′ is 2′-OMe or 2′-F, q¹ is 9, T1′ is 2′-F, q² is 1, B2′ is 2′-OMe or 2′-F, q³ is 4, q⁴ is 0, B3′ is 2′-OMe or 2′-F, q⁵ is 7, T3′ is 2′-F, q⁶ is 1, B4′ is 2′-F, and q⁷ is 1; with two phosphorothioate internucleotide linkage modifications within position 1-5 of the sense strand (counting from the 5′-end of the sense strand), and two phosphorothioate internucleotide linkage modifications at positions 1 and 2 and two phosphorothioate internucleotide linkage modifications within positions 18-23 of the antisense strand (counting from the 5′-end of the antisense strand). The RNAi agent also comprises a 5′-deoxy-5′-C-malonyl and a targeting ligand. In one embodiment, the 5′-deoxy-5′-C-malonyl is at the 5′-end of the antisense strand, and the targeting ligand is at the 3′-end of the sense strand.

[0539] In a particular embodiment, an RNAi agent of the present invention comprises:
[0540] (a) a sense strand having:
   [0541] (i) a length of 21 nucleotides;
   [0542] (ii) an ASGPR ligand attached to the 3′-end, wherein said ASGPR ligand comprises three GalNAc derivatives attached through a trivalent branched linker; and
   [0543] (iii) 2′-F modifications at positions 1, 3, 5, 7, 9 to 11, 13, 17, 19, and 21, and 2′-OMe modifications at positions 2, 4, 6, 8, 12, 14 to 16, 18, and 20 (counting from the 5′ end);
      [0544] and
[0545] (b) an antisense strand having:
   [0546] (i) a length of 23 nucleotides;
   [0547] (ii) 2′-OMe modifications at positions 1, 3, 5, 9, 11 to 13, 15, 17, 19, 21, and 23, and 2′F modifications at positions 2, 4, 6 to 8, 10, 14, 16, 18, 20, and 22 (counting from the 5′ end); and
   [0548] (iii) phosphorothioate internucleotide linkages between nucleotide positions 21 and 22, and between nucleotide positions 22 and 23 (counting from the 5′ end);
      [0549] wherein the dsRNA agents have a two nucleotide overhang at the 3′-end of the antisense strand, and a blunt end at the 5′-end of the antisense strand.

[0550] In another particular embodiment, an RNAi agent of the present invention comprises:
[0551] (a) a sense strand having:
   [0552] (i) a length of 21 nucleotides;
   [0553] (ii) an ASGPR ligand attached to the 3′-end, wherein said ASGPR ligand comprises three GalNAc derivatives attached through a trivalent branched linker;
   [0554] (iii) 2′-F modifications at positions 1, 3, 5, 7, 9 to 11, 13, 15, 17, 19, and 21, and 2′-OMe modifications at positions 2, 4, 6, 8, 12, 14, 16, 18, and 20 (counting from the 5′ end); and
   [0555] (iv) phosphorothioate internucleotide linkages between nucleotide positions 1 and 2, and between nucleotide positions 2 and 3 (counting from the 5′ end);
      [0556] and
[0557] (b) an antisense strand having:
   [0558] (i) a length of 23 nucleotides;
   [0559] (ii) 2′-OMe modifications at positions 1, 3, 5, 7, 9, 11 to 13, 15, 17, 19, and 21 to 23, and 2′F modifications at positions 2, 4, 6, 8, 10, 14, 16, 18, and 20 (counting from the 5′ end); and
   [0560] (iii) phosphorothioate internucleotide linkages between nucleotide positions 1 and 2, between nucleotide positions 2 and 3, between nucleotide positions 21 and 22, and between nucleotide positions 22 and 23 (counting from the 5′ end);
   [0561] wherein the RNAi agents have a two nucleotide overhang at the 3′-end of the antisense strand, and a blunt end at the 5′-end of the antisense strand.

[0562] In another particular embodiment, a RNAi agent of the present invention comprises:
[0563] (a) a sense strand having:
   [0564] (i) a length of 21 nucleotides;
   [0565] (ii) an ASGPR ligand attached to the 3′-end, wherein said ASGPR ligand comprises three GalNAc derivatives attached through a trivalent branched linker;
   [0566] (iii) 2′-OMe modifications at positions 1 to 6, 8, 10, and 12 to 21, 2′-F modifications at positions 7, and 9, and a desoxy-nucleotide (e.g. dT) at position 11 (counting from the 5′ end); and
   [0567] (iv) phosphorothioate internucleotide linkages between nucleotide positions 1 and 2, and between nucleotide positions 2 and 3 (counting from the 5′ end);
      [0568] and
[0569] (b) an antisense strand having:
   [0570] (i) a length of 23 nucleotides;
   [0571] (ii) 2′-OMe modifications at positions 1, 3, 7, 9, 11, 13, 15, 17, and 19 to 23, and 2′-F modifications at positions 2, 4 to 6, 8, 10, 12, 14, 16, and 18 (counting from the 5′ end); and
   [0572] (iii) phosphorothioate internucleotide linkages between nucleotide positions 1 and 2, between nucleotide positions 2 and 3, between nucleotide positions 21 and 22, and between nucleotide positions 22 and 23 (counting from the 5′ end);
   [0573] wherein the RNAi agents have a two nucleotide overhang at the 3′-end of the antisense strand, and a blunt end at the 5′-end of the antisense strand.

[0574] In another particular embodiment, aRNAi agent of the present invention comprises:
[0575] (a) a sense strand having:
   [0576] (i) a length of 21 nucleotides;
   [0577] (ii) an ASGPR ligand attached to the 3′-end, wherein said ASGPR ligand comprises three GalNAc derivatives attached through a trivalent branched linker;
   [0578] (iii) 2′-OMe modifications at positions 1 to 6, 8, 10, 12, 14, and 16 to 21, and 2′-F modifications at positions 7, 9, 11, 13, and 15; and
   [0579] (iv) phosphorothioate internucleotide linkages between nucleotide positions 1 and 2, and between nucleotide positions 2 and 3 (counting from the 5′ end);
      [0580] and
[0581] (b) an antisense strand having:
   [0582] (i) a length of 23 nucleotides;
   [0583] (ii) 2′-OMe modifications at positions 1, 5, 7, 9, 11, 13, 15, 17, 19, and 21 to 23, and 2′-F modifications at positions 2 to 4, 6, 8, 10, 12, 14, 16, 18, and 20 (counting from the 5′ end); and
   [0584] (iii) phosphorothioate internucleotide linkages between nucleotide positions 1 and 2, between nucleotide positions 2 and 3, between nucleotide positions 21 and 22, and between nucleotide positions 22 and 23 (counting from the 5′ end);
   [0585] wherein the RNAi agents have a two nucleotide overhang at the 3′-end of the antisense strand, and a blunt end at the 5′-end of the antisense strand.

[0586] In another particular embodiment, a RNAi agent of the present invention comprises:
[0587] (a) a sense strand having:
   [0588] (i) a length of 21 nucleotides;
   [0589] (ii) an ASGPR ligand attached to the 3′-end, wherein said ASGPR ligand comprises three GalNAc derivatives attached through a trivalent branched linker;
   [0590] (iii) 2′-OMe modifications at positions 1 to 9, and 12 to 21, and 2′-F modifications at positions 10, and 11; and
   [0591] (iv) phosphorothioate internucleotide linkages between nucleotide positions 1 and 2, and between nucleotide positions 2 and 3 (counting from the 5′ end);
      [0592] and
[0593] (b) an antisense strand having:
   [0594] (i) a length of 23 nucleotides;
   [0595] (ii) 2′-OMe modifications at positions 1, 3, 5, 7, 9, 11 to 13, 15, 17, 19, and 21 to 23, and 2′-F modifications at positions 2, 4, 6, 8, 10, 14, 16, 18, and 20 (counting from the 5′ end); and
   [0596] (iii) phosphorothioate internucleotide linkages between nucleotide positions 1 and 2, between nucleotide positions 2 and 3, between nucleotide positions 21 and 22, and between nucleotide positions 22 and 23 (counting from the 5′ end);
   [0597] wherein the RNAi agents have a two nucleotide overhang at the 3′-end of the antisense strand, and a blunt end at the 5′-end of the antisense strand.

[0598] In another particular embodiment, a RNAi agent of the present invention comprises:
[0599] (a) a sense strand having:
   [0600] (i) a length of 21 nucleotides;
   [0601] (ii) an ASGPR ligand attached to the 3′-end, wherein said ASGPR ligand comprises three GalNAc derivatives attached through a trivalent branched linker;
   [0602] (iii) 2′-F modifications at positions 1, 3, 5, 7, 9 to 11, and 13, and 2′-OMe modifications at positions 2, 4, 6, 8, 12, and 14 to 21; and
   [0603] (iv) phosphorothioate internucleotide linkages between nucleotide positions 1 and 2, and between nucleotide positions 2 and 3 (counting from the 5′ end);
      [0604] and
[0605] (b) an antisense strand having:
   [0606] (i) a length of 23 nucleotides;
   [0607] (ii) 2′-OMe modifications at positions 1, 3, 5 to 7, 9, 11 to 13, 15, 17 to 19, and 21 to 23, and 2′-F modifications at positions 2, 4, 8, 10, 14, 16, and 20 (counting from the 5′ end); and
   [0608] (iii) phosphorothioate internucleotide linkages between nucleotide positions 1 and 2, between nucleotide positions 2 and 3, between nucleotide positions 21 and 22, and between nucleotide positions 22 and 23 (counting from the 5′ end);
   [0609] wherein the RNAi agents have a two nucleotide overhang at the 3′-end of the antisense strand, and a blunt end at the 5′-end of the antisense strand.

[0610] In another particular embodiment, a RNAi agentsof the present invention comprises:
[0611] (a) a sense strand having:
   [0612] (i) a length of 21 nucleotides;
   [0613] (ii) an ASGPR ligand attached to the 3′-end, wherein said ASGPR ligand comprises three GalNAc derivatives attached through a trivalent branched linker;
   [0614] (iii) 2′-OMe modifications at positions 1, 2, 4, 6, 8, 12, 14, 15, 17, and 19 to 21, and 2′-F modifications at positions 3, 5, 7, 9 to 11, 13, 16, and 18; and
   [0615] (iv) phosphorothioate internucleotide linkages between nucleotide positions 1 and 2, and between nucleotide positions 2 and 3 (counting from the 5′ end);
      [0616] and
[0617] (b) an antisense strand having:
   [0618] (i) a length of 25 nucleotides;
   [0619] (ii) 2′-OMe modifications at positions 1, 4, 6, 7, 9, 11 to 13, 15, 17, and 19 to 23, 2′-F modifications at positions 2, 3, 5, 8, 10, 14, 16, and 18, and desoxy-nucleotides (e.g. dT) at positions 24 and 25 (counting from the 5′ end); and
   [0620] (iii) phosphorothioate internucleotide linkages between nucleotide positions 1 and 2, between nucleotide positions 2 and 3, between nucleotide positions 21 and 22, and between nucleotide positions 22 and 23 (counting from the 5′ end);
   [0621] wherein the RNAi agents have a four nucleotide overhang at the 3′-end of the antisense strand, and a blunt end at the 5′-end of the antisense strand.

[0622] In another particular embodiment, a RNAi agent of the present invention comprises:
[0623] (a) a sense strand having:
   [0624] (i) a length of 21 nucleotides;
   [0625] (ii) an ASGPR ligand attached to the 3′-end, wherein said ASGPR ligand comprises three GalNAc derivatives attached through a trivalent branched linker;
   [0626] (iii) 2′-OMe modifications at positions 1 to 6, 8, and 12 to 21, and 2′-F modifications at positions 7, and 9 to 11; and
   [0627] (iv) phosphorothioate internucleotide linkages between nucleotide positions 1 and 2, and between nucleotide positions 2 and 3 (counting from the 5′ end);
      [0628] and
[0629] (b) an antisense strand having:
   [0630] (i) a length of 23 nucleotides;
   [0631] (ii) 2′-OMe modifications at positions 1, 3 to 5, 7, 8, 10 to 13, 15, and 17 to 23, and 2′-F modifications at positions 2, 6, 9, 14, and 16 (counting from the 5′ end); and
   [0632] (iii) phosphorothioate internucleotide linkages between nucleotide positions 1 and 2, between nucleotide positions 2 and 3, between nucleotide positions 21 and 22, and between nucleotide positions 22 and 23 (counting from the 5′ end);
   [0633] wherein the RNAi agents have a two nucleotide overhang at the 3′-end of the antisense strand, and a blunt end at the 5′-end of the antisense strand.

[0634] In another particular embodiment, a RNAi agent of the present invention comprises:
[0635] (a) a sense strand having:
   [0636] (i) a length of 21 nucleotides;
   [0637] (ii) an ASGPR ligand attached to the 3′-end, wherein said ASGPR ligand comprises three GalNAc derivatives attached through a trivalent branched linker;
   [0638] (iii) 2′-OMe modifications at positions 1 to 6, 8, and 12 to 21, and 2′-F modifications at positions 7, and 9 to 11; and
   [0639] (iv) phosphorothioate internucleotide linkages between nucleotide positions 1 and 2, and between nucleotide positions 2 and 3 (counting from the 5′ end);
      [0640] and
[0641] (b) an antisense strand having:
   [0642] (i) a length of 23 nucleotides;
   [0643] (ii) 2′-OMe modifications at positions 1, 3 to 5, 7, 10 to 13, 15, and 17 to 23, and 2′-F modifications at positions 2, 6, 8, 9, 14, and 16 (counting from the 5′ end); and
   [0644] (iii) phosphorothioate internucleotide linkages between nucleotide positions 1 and 2, between nucleotide positions 2 and 3, between nucleotide positions 21 and 22, and between nucleotide positions 22 and 23 (counting from the 5′ end);
   [0645] wherein the RNAi agents have a two nucleotide overhang at the 3′-end of the antisense strand, and a blunt end at the 5′-end of the antisense strand.

[0646] In another particular embodiment, a RNAi agent of the present invention comprises:
[0647] (a) a sense strand having:
   [0648] (i) a length of 19 nucleotides;
   [0649] (ii) an ASGPR ligand attached to the 3′-end, wherein said ASGPR ligand comprises three GalNAc derivatives attached through a trivalent branched linker;
   [0650] (iii) 2′-OMe modifications at positions 1 to 4, 6, and 10 to 19, and 2′-F modifications at positions 5, and 7 to 9; and
   [0651] (iv) phosphorothioate internucleotide linkages between nucleotide positions 1 and 2, and between nucleotide positions 2 and 3 (counting from the 5′ end);
      [0652] and
[0653] (b) an antisense strand having:
   [0654] (i) a length of 21 nucleotides;
   [0655] (ii) 2′-OMe modifications at positions 1, 3 to 5, 7, 10 to 13, 15, and 17 to 21, and 2′-F modifications at positions 2, 6, 8, 9, 14, and 16 (counting from the 5′ end); and
   [0656] (iii) phosphorothioate internucleotide linkages between nucleotide positions 1 and 2, between nucleotide positions 2 and 3, between nucleotide positions 19 and 20, and between nucleotide positions 20 and 21 (counting from the 5′ end);
   [0657] wherein the RNAi agents have a two nucleotide overhang at the 3′-end of the antisense strand, and a blunt end at the 5′-end of the antisense strand.

### IV. iRNAs Conjugated to Ligands

[0658] Another modification of the RNA of an iRNA of the invention involves chemically linking to the RNA one or more ligands, moieties or conjugates that enhance the activity, cellular distribution or cellular uptake of the iRNA. Such moieties include but are not limited to lipid moieties such as a cholesterol moiety (Letsinger et al., (1989) Proc. Natl. Acid. Sci. USA, 86: 6553-6556), cholic acid (Manoharan et al., (1994) Biorg. Med. Chem. Let., 4:1053-1060), a thioether, e.g., beryl-S-tritylthiol (Manoharan et al., (1992) Ann. N.Y. Acad. Sci., 660:306-309; Manoharan et al., (1993) Biorg. Med. Chem. Let., 3:2765-2770), a thiocholesterol (Oberhauser et al., (1992) Nucl. Acids Res., 20:533-538), an aliphatic chain, e.g., dodecandiol or undecyl residues (Saison-Behmoaras et al., (1991) EMBO J, 10:1111-1118; Kabanov et al., (1990) FEBS Lett., 259:327-330; Svinarchuk et al., (1993) Biochimie, 75:49-54), a phospholipid, e.g., di-hexadecyl-rac-glycerol or triethyl-ammonium 1,2-di-O-hexadecyl-rac-glycero-3-phosphonate (Manoharan et al., (1995) Tetrahedron Lett., 36:3651-3654; Shea et al., (1990) Nucl. Acids Res., 18:3777-3783), a polyamine or a polyethylene glycol chain (Manoharan et al., (1995) Nucleosides & Nucleotides, 14:969-973), or adamantane acetic acid (Manoharan et al., (1995) Tetrahedron Lett., 36:3651-3654), a palmityl moiety (Mishra et al., (1995) Biochim. Biophys. Acta, 1264:229-237), or an octadecylamine or hexylamino-carbonyloxycholesterol moiety (Crooke et al., (1996) J. Pharmacol. Exp. Ther., 277:923-937).

[0659] In embodiments in which a first dsRNA agent targeting LDHA and a second dsRNA agent targeting HAO1 are covalently attached (i.e., a dual targeting RNAi agent described herein), one or both of the dsRNA agents may independently comprise one or more ligands.

[0660] In one embodiment, a ligand alters the distribution, targeting or lifetime of an iRNA agent into which it is incorporated. In preferred embodiments a ligand provides an enhanced affinity for a selected target, e.g., molecule, cell or cell type, compartment, e.g., a cellular or organ compartment, tissue, organ or region of the body, as, e.g., compared to a species absent such a ligand. Preferred ligands will not take part in duplex pairing in a duplexed nucleic acid.

[0661] Ligands can include a naturally occurring substance, such as a protein (e.g., human serum albumin (HSA), low-density lipoprotein (LDL), or globulin); carbohydrate (e.g., a dextran, pullulan, chitin, chitosan, inulin, cyclodextrin, N-acetylglucosamine, N-acetylgalactosamine or hyaluronic acid); or a lipid. The ligand can also be a recombinant or synthetic molecule, such as a synthetic polymer, e.g., a synthetic polyamino acid. Examples of polyamino acids include polyamino acid is a polylysine (PLL), poly L-aspartic acid, poly L-glutamic acid, styrene-maleic acid anhydride copolymer, poly(L-lactide-co-glycolied) copolymer, divinyl ether-maleic anhydride copolymer, N-(2-hydroxypropyl)methacrylamide copolymer (HMPA), polyethylene glycol (PEG), polyvinyl alcohol (PVA), polyurethane, poly(2-ethylacryllic acid), N-isopropylacrylamide polymers, or polyphosphazine. Example of polyamines include: polyethylenimine, polylysine (PLL), spermine, spermidine, polyamine, pseudopeptide-polyamine, peptidomimetic polyamine, dendrimer polyamine, arginine, amidine, protamine, cationic lipid, cationic porphyrin, quaternary salt of a polyamine, or an alpha helical peptide.

[0662] Ligands can also include targeting groups, e.g., a cell or tissue targeting agent, e.g., a lectin, glycoprotein, lipid or protein, e.g., an antibody, that binds to a specified cell type such as a kidney cell. A targeting group can be a thyrotropin, melanotropin, lectin, glycoprotein, surfactant protein A, Mucin carbohydrate, multivalent lactose, multivalent galactose, N-acetyl-galactosamine, N-acetyl-gulucosamine multivalent mannose, multivalent fucose, glycosylated polyaminoacids, multivalent galactose, transferrin, bisphosphonate, polyglutamate, polyaspartate, a lipid, cholesterol, a steroid, bile acid, folate, vitamin B12, vitamin A, biotin, or an RGD peptide or RGD peptide mimetic.

[0663] Other examples of ligands include dyes, intercalating agents (e.g. acridines), cross-linkers (e.g. psoralen, mitomycin C), porphyrins (TPPC4, texaphyrin, Sapphyrin), polycyclic aromatic hydrocarbons (e.g., phenazine, dihydrophenazine), artificial endonucleases (e.g. EDTA), lipophilic molecules, e.g., cholesterol, cholic acid, adamantane acetic acid, 1-pyrene butyric acid, dihydrotestosterone, 1,3-Bis-O(hexadecyl)glycerol, geranyloxyhexyl group, hexadecylglycerol, borneol, menthol, 1,3-propanediol, heptadecyl group, palmitic acid, myristic acid, O3-(oleoyl)lithocholic acid, O3-(oleoyl)cholenic acid, dimethoxytrityl, or phenoxazine) and peptide conjugates (e.g., antennapedia peptide, Tat peptide), alkylating agents, phosphate, amino, mercapto, PEG (e.g., PEG-40K), MPEG, [MPEG]₂, polyamino, alkyl, substituted alkyl, radiolabeled markers, enzymes, haptens (e.g. biotin), transport/absorption facilitators (e.g., aspirin, vitamin E, folic acid), synthetic ribonucleases (e.g., imidazole, bisimidazole, histamine, imidazole clusters, acridine-imidazole conjugates, Eu3+ complexes of tetraazamacrocycles), dinitrophenyl, HRP, or AP.

[0664] Ligands can be proteins, e.g., glycoproteins, or peptides, e.g., molecules having a specific affinity for a co-ligand, or antibodies e.g., an antibody, that binds to a specified cell type such as a hepatic cell. Ligands can also include hormones and hormone receptors. They can also include non-peptidic species, such as lipids, lectins, carbohydrates, vitamins, cofactors, multivalent lactose, multivalent galactose, N-acetyl-galactosamine, N-acetyl-gulucosamine multivalent mannose, or multivalent fucose. The ligand can be, for example, a lipopolysaccharide, an activator of p38 MAP kinase, or an activator of NF-κB.

[0665] The ligand can be a substance, e.g., a drug, which can increase the uptake of the iRNA agent into the cell, for example, by disrupting the cell's cytoskeleton, e.g., by disrupting the cell's microtubules, microfilaments, and/or intermediate filaments. The drug can be, for example, taxon, vincristine, vinblastine, cytochalasin, nocodazole, japlakinolide, latrunculin A, phalloidin, swinholide A, indanocine, or myoservin.

[0666] In some embodiments, a ligand attached to an iRNA as described herein acts as a pharmacokinetic modulator (PK modulator). PK modulators include lipophiles, bile acids, steroids, phospholipid analogues, peptides, protein binding agents, PEG, vitamins etc. Exemplary PK modulators include, but are not limited to, cholesterol, fatty acids, cholic acid, lithocholic acid, dialkylglycerides, diacylglyceride, phospholipids, sphingolipids, naproxen, ibuprofen, vitamin E, biotin etc. Oligonucleotides that comprise a number of phosphorothioate linkages are also known to bind to serum protein, thus short oligonucleotides, e.g., oligonucleotides of about 5 bases, 10 bases, 15 bases or 20 bases, comprising multiple of phosphorothioate linkages in the backbone are also amenable to the present invention as ligands (e.g. as PK modulating ligands). In addition, aptamers that bind serum components (e.g. serum proteins) are also suitable for use as PK modulating ligands in the embodiments described herein.

[0667] Ligand-conjugated oligonucleotides of the invention may be synthesized by the use of an oligonucleotide that bears a pendant reactive functionality, such as that derived from the attachment of a linking molecule onto the oligonucleotide (described below). This reactive oligonucleotide may be reacted directly with commercially-available ligands, ligands that are synthesized bearing any of a variety of protecting groups, or ligands that have a linking moiety attached thereto.

[0668] The oligonucleotides used in the conjugates of the present invention may be conveniently and routinely made through the well-known technique of solid-phase synthesis. Equipment for such synthesis is sold by several vendors including, for example, Applied Biosystems (Foster City, Calif.). Any other means for such synthesis known in the art may additionally or alternatively be employed. It is also known to use similar techniques to prepare other oligonucleotides, such as the phosphorothioates and alkylated derivatives.

[0669] In the ligand-conjugated oligonucleotides and ligand-molecule bearing sequence-specific linked nucleosides of the present invention, the oligonucleotides and oligonucleosides may be assembled on a suitable DNA synthesizer utilizing standard nucleotide or nucleoside precursors, or nucleotide or nucleoside conjugate precursors that already bear the linking moiety, ligand-nucleotide or nucleoside-conjugate precursors that already bear the ligand molecule, or non-nucleoside ligand-bearing building blocks.

[0670] When using nucleotide-conjugate precursors that already bear a linking moiety, the synthesis of the sequence-specific linked nucleosides is typically completed, and the ligand molecule is then reacted with the linking moiety to form the ligand-conjugated oligonucleotide. In some embodiments, the oligonucleotides or linked nucleosides of the present invention are synthesized by an automated synthesizer using phosphoramidites derived from ligand-nucleoside conjugates in addition to the standard phosphoramidites and non-standard phosphoramidites that are commercially available and routinely used in oligonucleotide synthesis.

[0671] A. Lipid Conujugates

[0672] In one embodiment, the ligand or conjugate is a lipid or lipid-based molecule. Such a lipid or lipid-based molecule preferably binds a serum protein, e.g., human serum albumin (HSA). An HSA binding ligand allows for distribution of the conjugate to a target tissue, e.g., a non-kidney target tissue of the body. For example, the target tissue can be the liver, including parenchymal cells of the liver. Other molecules that can bind HSA can also be used as ligands. For example, neproxin or aspirin can be used. A lipid or lipid-based ligand can (a) increase resistance to degradation of the conjugate, (b) increase targeting or transport into a target cell or cell membrane, and/or (c) can be used to adjust binding to a serum protein, e.g., HSA.

[0673] A lipid based ligand can be used to inhibit, e.g., control the binding of the conjugate to a target tissue. For example, a lipid or lipid-based ligand that binds to HSA more strongly will be less likely to be targeted to the kidney and therefore less likely to be cleared from the body. A lipid or lipid-based ligand that binds to HSA less strongly can be used to target the conjugate to the kidney.

[0674] In a preferred embodiment, the lipid based ligand binds HSA. Preferably, it binds HSA with a sufficient affinity such that the conjugate will be preferably distributed to a non-kidney tissue. However, it is preferred that the affinity not be so strong that the HSA-ligand binding cannot be reversed.

[0675] In another preferred embodiment, the lipid based ligand binds HSA weakly or not at all, such that the conjugate will be preferably distributed to the kidney. Other moieties that target to kidney cells can also be used in place of or in addition to the lipid based ligand.

[0676] In another aspect, the ligand is a moiety, e.g., a vitamin, which is taken up by a target cell, e.g., a proliferating cell. These are particularly useful for treating disorders characterized by unwanted cell proliferation, e.g., of the malignant or non-malignant type, e.g., cancer cells. Exemplary vitamins include vitamin A, E, and K. Other exemplary vitamins include are B vitamin, e.g., folic acid, B12, riboflavin, biotin, pyridoxal or other vitamins or nutrients taken up by target cells such as liver cells. Also included are HSA and low density lipoprotein (LDL).

[0677] B. Cell Permeation Agents

[0678] In another aspect, the ligand is a cell-permeation agent, preferably a helical cell-permeation agent. Preferably, the agent is amphipathic. An exemplary agent is a peptide such as tat or antennopedia. If the agent is a peptide, it can be modified, including a peptidylmimetic, invertomers, non-peptide or pseudo-peptide linkages, and use of D-amino acids. The helical agent is preferably an alpha-helical agent, which preferably has a lipophilic and a lipophobic phase.

[0679] The ligand can be a peptide or peptidomimetic. A peptidomimetic (also referred to herein as an oligopeptidomimetic) is a molecule capable of folding into a defined three-dimensional structure similar to a natural peptide. The attachment of peptide and peptidomimetics to iRNA agents can affect pharmacokinetic distribution of the iRNA, such as by enhancing cellular recognition and absorption. The peptide or peptidomimetic moiety can be about 5-50 amino acids long, e.g., about 5, 10, 15, 20, 25, 30, 35, 40, 45, or 50 amino acids long.

[0680] A peptide or peptidomimetic can be, for example, a cell permeation peptide, cationic peptide, amphipathic peptide, or hydrophobic peptide (e.g., consisting primarily of Tyr, Trp or Phe). The peptide moiety can be a dendrimer peptide, constrained peptide or crosslinked peptide. In another alternative, the peptide moiety can include a hydrophobic membrane translocation sequence (MTS). An exemplary hydrophobic MTS-containing peptide is RFGF having the amino acid sequence AAVALLPAVLLALLAP (SEQ ID NO: 2986). An RFGF analogue (e.g., amino acid sequence AALLPVLLAAP (SEQ ID NO: 2987) containing a hydrophobic MTS can also be a targeting moiety. The peptide moiety can be a “delivery” peptide, which can carry large polar molecules including peptides, oligonucleotides, and protein across cell membranes. For example, sequences from the HIV Tat protein (GRKKRRQRRRPPQ (SEQ ID NO: 2988) and the Drosophila Antennapedia protein (RQIKIWFQNRRMKWKK (SEQ ID NO: 2989) have been found to be capable of functioning as delivery peptides. A peptide or peptidomimetic can be encoded by a random sequence of DNA, such as a peptide identified from a phage-display library, or one-bead-one-compound (OBOC) combinatorial library (Lam et al., Nature, 354:82-84, 1991). Examples of a peptide or peptidomimetic tethered to a dsRNA agent via an incorporated monomer unit for cell targeting purposes is an arginine-glycine-aspartic acid (RGD)-peptide, or RGD mimic A peptide moiety can range in length from about 5 amino acids to about 40 amino acids. The peptide moieties can have a structural modification, such as to increase stability or direct conformational properties. Any of the structural modifications described below can be utilized.

[0681] An RGD peptide for use in the compositions and methods of the invention may be linear or cyclic, and may be modified, e.g., glyciosylated or methylated, to facilitate targeting to a specific tissue(s). RGD-containing peptides and peptidiomimemtics may include D-amino acids, as well as synthetic RGD mimics. In addition to RGD, one can use other moieties that target the integrin ligand. Preferred conjugates of this ligand target PECAM-1 or VEGF.

[0682] A “cell permeation peptide” is capable of permeating a cell, e.g., a microbial cell, such as a bacterial or fungal cell, or a mammalian cell, such as a human cell. A microbial cell-permeating peptide can be, for example, a α-helical linear peptide (e.g., LL-37 or Ceropin P1), a disulfide bond-containing peptide (e.g., α-defensin, β-defensin or bactenecin), or a peptide containing only one or two dominating amino acids (e.g., PR-39 or indolicidin). A cell permeation peptide can also include a nuclear localization signal (NLS). For example, a cell permeation peptide can be a bipartite amphipathic peptide, such as MPG, which is derived from the fusion peptide domain of HIV-1 gp41 and the NLS of SV40 large T antigen (Simeoni et al., Nucl. Acids Res. 31:2717-2724, 2003).

[0683] C. Carbohydrate Conjugates

[0684] In some embodiments of the compositions and methods of the invention, an iRNA oligonucleotide further comprises a carbohydrate. The carbohydrate conjugated iRNA are advantageous for the in vivo delivery of nucleic acids, as well as compositions suitable for in vivo therapeutic use, as described herein. As used herein, “carbohydrate” refers to a compound which is either a carbohydrate per se made up of one or more monosaccharide units having at least 6 carbon atoms (which can be linear, branched or cyclic) with an oxygen, nitrogen or sulfur atom bonded to each carbon atom; or a compound having as a part thereof a carbohydrate moiety made up of one or more monosaccharide units each having at least six carbon atoms (which can be linear, branched or cyclic), with an oxygen, nitrogen or sulfur atom bonded to each carbon atom. Representative carbohydrates include the sugars (mono-, di-, tri- and oligosaccharides containing from about 4, 5, 6, 7, 8, or 9 monosaccharide units), and polysaccharides such as starches, glycogen, cellulose and polysaccharide gums. Specific monosaccharides include C5 and above (e.g., C5, C6, C7, or C8) sugars; di- and trisaccharides include sugars having two or three monosaccharide units (e.g., C5, C6, C7, or C8).

[0685] In embodiments in which a first dsRNA agent targeting LDHA and a second dsRNA agent targeting HAO1 are covalently attached (i.e., a dual targetingRNAi agent), one or both of the dsRNA agents may independently comprise one or more carbohydrate ligands.

[0686] In one embodiment, a carbohydrate conjugate for use in the compositions and methods of the invention is selected from the group consisting of:

[chemical structure]

[chemical structure]

[chemical structure]

[chemical structure]

[chemical structure]

wherein Y is O or S and n is 3-6 (Formula XXIV);

[chemical structure]

wherein Y is O or S and n is 3-6 (Formula XXV);

[chemical structure]

wherein X is O or S (Formula XXVII);

[chemical structure]

[chemical structure]

[chemical structure]

[0687] In another embodiment, a carbohydrate conjugate for use in the compositions and methods of the invention is a monosaccharide. In one embodiment, the monosaccharide is an N-acetylgalactosamine, such as

[chemical structure]

[0688] Another representative carbohydrate conjugate for use in the embodiments described herein includes, but is not limited to,

[chemical structure]

when one of X or Y is an oligonucleotide, the other is a hydrogen.

[0689] In embodiments in which a first dsRNA agent targeting LDHA and a second dsRNA agent targeting HAO1 are covalently attached (i.e., a dual targetingRNAi agent), one or both of the dsRNA agents may independently comprise a GalNAc or GalNAc derivative ligand.

[0690] In certain embodiments of the invention, the GalNAc or GalNAc derivative is attached to an iRNA agent of the invention via a monovalent linker. In some embodiments, the GalNAc or GalNAc derivative is attached to an iRNA agent of the invention via a bivalent linker. In yet other embodiments of the invention, the GalNAc or GalNAc derivative is attached to an iRNA agent of the invention via a trivalent linker.

[0691] In one embodiment, the double stranded RNAi agents of the invention comprise one GalNAc or GalNAc derivative attached to the iRNA agent, e.g., the 5′end of the sense strand of a dsRNA agent, or the 5′ end of one or both sense strands of a dual targeting RNAi agent as described herein. In another embodiment, the double stranded RNAi agents of the invention, or one or both dsRNA agents of a dual targeting RNAi agent as described herein, comprise a plurality (e.g., 2, 3, 4, 5, or 6) GalNAc or GalNAc derivatives, each independently attached to a plurality of nucleotides of the double stranded RNAi agent through a plurality of monovalent linkers.

[0692] In some embodiments, for example, when the two strands of an iRNA agent of the invention are part of one larger molecule connected by an uninterrupted chain of nucleotides between the 3′-end of one strand and the 5′-end of the respective other strand forming a hairpin loop comprising, a plurality of unpaired nucleotides, each unpaired nucleotide within the hairpin loop may independently comprise a GalNAc or GalNAc derivative attached via a monovalent linker.

[0693] In some embodiments, the carbohydrate conjugate further comprises one or more additional ligands as described above, such as, but not limited to, a PK modulator and/or a cell permeation peptide.

[0694] Additional carbohydrate conjugates (and linkers) suitable for use in the present invention include those described in PCT Publication Nos. WO 2014/179620 and WO 2014/179627, the entire contents of each of which are incorporated herein by reference.

[0695] D. Linkers

[0696] In some embodiments, the conjugate or ligand described herein can be attached to an iRNA oligonucleotide with various linkers that can be cleavable or non cleavable.

[0697] The term “linker” or “linking group” means an organic moiety that connects two parts of a compound, e.g., covalently attaches two parts of a compound. Linkers typically comprise a direct bond or an atom such as oxygen or sulfur, a unit such as NRB, C(O), C(O)NH, SO, SO₂, SO₂NH or a chain of atoms, such as, but not limited to, substituted or unsubstituted alkyl, substituted or unsubstituted alkenyl, substituted or unsubstituted alkynyl, arylalkyl, arylalkenyl, arylalkynyl, heteroarylalkyl, heteroarylalkenyl, heteroarylalkynyl, heterocyclylalkyl, heterocyclylalkenyl, heterocyclylalkynyl, aryl, heteroaryl, heterocyclyl, cycloalkyl, cycloalkenyl, alkylarylalkyl, alkylarylalkenyl, alkylarylalkynyl, alkenylarylalkyl, alkenylarylalkenyl, alkenylarylalkynyl, alkynylarylalkyl, alkynylarylalkenyl, alkynylarylalkynyl, alkylheteroarylalkyl, alkylheteroarylalkenyl, alkylheteroarylalkynyl, alkenylheteroarylalkyl, alkenylheteroarylalkenyl, alkenylheteroarylalkynyl, alkynylheteroarylalkyl, alkynylheteroarylalkenyl, alkynylheteroarylalkynyl, alkylheterocyclylalkyl, alkylheterocyclylalkenyl, alkylhererocyclylalkynyl, alkenylheterocyclylalkyl, alkenylheterocyclylalkenyl, alkenylheterocyclylalkynyl, alkynylheterocyclylalkyl, alkynylheterocyclylalkenyl, alkynylheterocyclylalkynyl, alkylaryl, alkenylaryl, alkynylaryl, alkylheteroaryl, alkenylheteroaryl, alkynylhereroaryl, which one or more methylenes can be interrupted or terminated by 0, S, S(O), SO₂, N(R8), C(O), substituted or unsubstituted aryl, substituted or unsubstituted heteroaryl, substituted or unsubstituted heterocyclic; where R8 is hydrogen, acyl, aliphatic or substituted aliphatic. In one embodiment, the linker is between about 1-24 atoms, 2-24, 3-24, 4-24, 5-24, 6-24, 6-18, 7-18, 8-18 atoms, 7-17, 8-17, 6-16, 7-17, or 8-16 atoms.

[0698] A cleavable linking group is one which is sufficiently stable outside the cell, but which upon entry into a target cell is cleaved to release the two parts the linker is holding together. In a preferred embodiment, the cleavable linking group is cleaved at least about 10 times, 20, times, 30 times, 40 times, 50 times, 60 times, 70 times, 80 times, 90 times or more, or at least about 100 times faster in a target cell or under a first reference condition (which can, e.g., be selected to mimic or represent intracellular conditions) than in the blood of a subject, or under a second reference condition (which can, e.g., be selected to mimic or represent conditions found in the blood or serum).

[0699] Cleavable linking groups are susceptible to cleavage agents, e.g., pH, redox potential or the presence of degradative molecules. Generally, cleavage agents are more prevalent or found at higher levels or activities inside cells than in serum or blood. Examples of such degradative agents include: redox agents which are selected for particular substrates or which have no substrate specificity, including, e.g., oxidative or reductive enzymes or reductive agents such as mercaptans, present in cells, that can degrade a redox cleavable linking group by reduction; esterases; endosomes or agents that can create an acidic environment, e.g., those that result in a pH of five or lower; enzymes that can hydrolyze or degrade an acid cleavable linking group by acting as a general acid, peptidases (which can be substrate specific), and phosphatases.

[0700] A cleavable linkage group, such as a disulfide bond can be susceptible to pH. The pH of human serum is 7.4, while the average intracellular pH is slightly lower, ranging from about 7.1-7.3. Endosomes have a more acidic pH, in the range of 5.5-6.0, and lysosomes have an even more acidic pH at around 5.0. Some linkers will have a cleavable linking group that is cleaved at a preferred pH, thereby releasing a cationic lipid from the ligand inside the cell, or into the desired compartment of the cell.

[0701] A linker can include a cleavable linking group that is cleavable by a particular enzyme. The type of cleavable linking group incorporated into a linker can depend on the cell to be targeted. For example, a liver-targeting ligand can be linked to a cationic lipid through a linker that includes an ester group. Liver cells are rich in esterases, and therefore the linker will be cleaved more efficiently in liver cells than in cell types that are not esterase-rich. Other cell-types rich in esterases include cells of the lung, renal cortex, and testis.

[0702] Linkers that contain peptide bonds can be used when targeting cell types rich in peptidases, such as liver cells and synoviocytes.

[0703] In general, the suitability of a candidate cleavable linking group can be evaluated by testing the ability of a degradative agent (or condition) to cleave the candidate linking group. It will also be desirable to also test the candidate cleavable linking group for the ability to resist cleavage in the blood or when in contact with other non-target tissue. Thus, one can determine the relative susceptibility to cleavage between a first and a second condition, where the first is selected to be indicative of cleavage in a target cell and the second is selected to be indicative of cleavage in other tissues or biological fluids, e.g., blood or serum. The evaluations can be carried out in cell free systems, in cells, in cell culture, in organ or tissue culture, or in whole animals. It can be useful to make initial evaluations in cell-free or culture conditions and to confirm by further evaluations in whole animals. In preferred embodiments, useful candidate compounds are cleaved at least about 2, 4, 10, 20, 30, 40, 50, 60, 70, 80, 90, or about 100 times faster in the cell (or under in vitro conditions selected to mimic intracellular conditions) as compared to blood or serum (or under in vitro conditions selected to mimic extracellular conditions).

[0704] i. Redox Cleavable Linking Groups

[0705] In one embodiment, a cleavable linking group is a redox cleavable linking group that is cleaved upon reduction or oxidation. An example of reductively cleavable linking group is a disulphide linking group (—S—S—). To determine if a candidate cleavable linking group is a suitable “reductively cleavable linking group,” or for example is suitable for use with a particular iRNA moiety and particular targeting agent one can look to methods described herein. For example, a candidate can be evaluated by incubation with dithiothreitol (DTT), or other reducing agent using reagents know in the art, which mimic the rate of cleavage which would be observed in a cell, e.g., a target cell. The candidates can also be evaluated under conditions which are selected to mimic blood or serum conditions. In one, candidate compounds are cleaved by at most about 10% in the blood. In other embodiments, useful candidate compounds are degraded at least about 2, 4, 10, 20, 30, 40, 50, 60, 70, 80, 90, or about 100 times faster in the cell (or under in vitro conditions selected to mimic intracellular conditions) as compared to blood (or under in vitro conditions selected to mimic extracellular conditions). The rate of cleavage of candidate compounds can be determined using standard enzyme kinetics assays under conditions chosen to mimic intracellular media and compared to conditions chosen to mimic extracellular media.

[0706] ii. Phosphate-Based Cleavable Linking Groups

[0707] In another embodiment, a cleavable linker comprises a phosphate-based cleavable linking group. A phosphate-based cleavable linking group is cleaved by agents that degrade or hydrolyze the phosphate group. An example of an agent that cleaves phosphate groups in cells are enzymes such as phosphatases in cells. Examples of phosphate-based linking groups are —O—P(O)(ORk)-O—, —O—P(S)(ORk)-O—, —O—P(S)(SRk)-O—, —S—P(O)(ORk)-O—, —O—P(O)(ORk)-S—, —S—P(O)(ORk)-S—, —O—P(S)(ORk)-S—, —S—P(S)(ORk)-O—, —O—P(O)(Rk)-O—, —O—P(S)(Rk)-O—, —S—P(O)(Rk)-O—, —S—P(S)(Rk)-O—, —S—P(O)(Rk)-S—, —O—P(S)(Rk)-S—. Preferred embodiments are —O—P(O)(OH)—O—, —O—P(S)(OH)—O—, —O—P(S)(SH)—O—, —S—P(O)(OH)—O—, —O—P(O)(OH)—S—, —S—P(O)(OH)—S—, —O—P(S)(OH)—S—, —S—P(S)(OH)—O—, —O—P(O)(H)—O—, —O—P(S)(H)—O—, —S—P(O)(H)—O—, —S—P(S)(H)—O—, —S—P(O)(H)—S—, —O—P(S)(H)—S—. A preferred embodiment is —O—P(O)(OH)—O—. These candidates can be evaluated using methods analogous to those described above.

[0708] iii. Acid Cleavable Linking Groups

[0709] In another embodiment, a cleavable linker comprises an acid cleavable linking group. An acid cleavable linking group is a linking group that is cleaved under acidic conditions. In preferred embodiments acid cleavable linking groups are cleaved in an acidic environment with a pH of about 6.5 or lower (e.g., about 6.0, 5.75, 5.5, 5.25, 5.0, or lower), or by agents such as enzymes that can act as a general acid. In a cell, specific low pH organelles, such as endosomes and lysosomes can provide a cleaving environment for acid cleavable linking groups. Examples of acid cleavable linking groups include but are not limited to hydrazones, esters, and esters of amino acids. Acid cleavable groups can have the general formula —C═NN—, C(O)O, or —OC(O). A preferred embodiment is when the carbon attached to the oxygen of the ester (the alkoxy group) is an aryl group, substituted alkyl group, or tertiary alkyl group such as dimethyl pentyl or t-butyl. These candidates can be evaluated using methods analogous to those described above.

[0710] iv. Ester-Based Linking Groups

[0711] In another embodiment, a cleavable linker comprises an ester-based cleavable linking group. An ester-based cleavable linking group is cleaved by enzymes such as esterases and amidases in cells. Examples of ester-based cleavable linking groups include but are not limited to esters of alkylene, alkenylene and alkynylene groups. Ester cleavable linking groups have the general formula —C(O)O—, or —OC(O)—. These candidates can be evaluated using methods analogous to those described above.

[0712] v. Peptide-Based Cleaving Groups

[0713] In yet another embodiment, a cleavable linker comprises a peptide-based cleavable linking group. A peptide-based cleavable linking group is cleaved by enzymes such as peptidases and proteases in cells. Peptide-based cleavable linking groups are peptide bonds formed between amino acids to yield oligopeptides (e.g., dipeptides, tripeptides etc.) and polypeptides. Peptide-based cleavable groups do not include the amide group (—C(O)NH—). The amide group can be formed between any alkylene, alkenylene or alkynelene. A peptide bond is a special type of amide bond formed between amino acids to yield peptides and proteins. The peptide based cleavage group is generally limited to the peptide bond (i.e., the amide bond) formed between amino acids yielding peptides and proteins and does not include the entire amide functional group. Peptide-based cleavable linking groups have the general formula —NHCHRAC(O)NHCHRBC(O)—, where RA and RB are the R groups of the two adjacent amino acids. These candidates can be evaluated using methods analogous to those described above.

[0714] In one embodiment, an iRNA of the invention is conjugated to a carbohydrate through a linker. Non-limiting examples of iRNA carbohydrate conjugates with linkers of the compositions and methods of the invention include, but are not limited to,

[chemical structure]

[chemical structure]

when one of X or Y is an oligonucleotide, the other is a hydrogen.

[0715] In certain embodiments of the compositions and methods of the invention, a ligand is one or more GalNAc (N-acetylgalactosamine) derivatives attached through a bivalent or trivalent branched linker.

[0716] In embodiments in which a first dsRNA agent targeting LDHA and a second dsRNA agent targeting HAO1 are covalently attached (i.e., a dual targetingRNAi agent), one or both of the dsRNA agents may independently a ligand comprising one or more GalNAc (N-acetylgalactosamine) derivatives attached through a bivalent or trivalent branched linker.

[0717] In one embodiment, a dsRNA of the invention is conjugated to a bivalent or trivalent branched linker selected from the group of structures shown in any of formula (XLV)-(XLVI):

[chemical structure]

wherein:
q2A, q2B, q3A, q3B, q4A, q4B, q5A, q5B and q5C represent independently for each occurrence 0-20 and wherein the repeating unit can be the same or different;
P^{2A}, P^{2B}, P^{3A}, P^{3B}, P^{4A}, P^{4B}, P^{5A}, P^{5B}, P^{5C}, T^{2A}, T^{2B}, T^{3A}, T^{3B}, T^{4A}, T^{4B}, T^{4A}, T^{5B}, T^{5C} are each independently for each occurrence absent, CO, NH, O, S, OC(O), NHC(O), CH₂, CH₂NH or CH₂O;
Q^{2A}, Q^{2B}, Q_{3A}, Q^{4A}, Q^{4B}, Q^{5A}, Q^{5B}, Q^{5C} are independently for each occurrence absent, alkylene, substituted alkylene wherin one or more methylenes can be interrupted or terminated by one or more of O, S, S(O), SO₂, N(R^{N}), C(R′)═C(R″), CC or C(O);

[0718] R^{2A}, R^{2B}, R^{3A}, R^{3B}, R^{4A}, R^{4B}, R^{5A}, R^{5B}, R^{5C} are each independently for each occurrence absent, NH, O, S, CH₂, C(O)O, C(O)NH, NHCH(R^{a})C(O), —C(O)—CH(R^{a})—NH—, CO, CH═N—O,

[chemical structure]

or heterocyclyl;

[0719] L^{2A}, L^{2B}, L^{3A}, L^{3B}, L^{4A}, L^{4B}, L^{5A}, L^{5B} and L^{5C} represent the ligand; i.e. each independently for each occurrence a monosaccharide (such as GalNAc), disaccharide, trisaccharide, tetrasaccharide, oligosaccharide, or polysaccharide; and R^{a} is H or amino acid side chain. Trivalent conjugating GalNAc derivatives are particularly useful for use with RNAi agents for inhibiting the expression of a target gene, such as those of formula (XLIX):

[chemical structure]

[0720] wherein L^{5A}, L^{5B} and L^{5C} represent a monosaccharide, such as GalNAc derivative.

[0721] Examples of suitable bivalent and trivalent branched linker groups conjugating GalNAc derivatives include, but are not limited to, the structures recited above as formulas II, VII, XI, X, and XIII.

[0722] Representative U.S. patents that teach the preparation of RNA conjugates include, but are not limited to, U.S. Pat. Nos. 4,828,979; 4,948,882; 5,218,105; 5,525,465; 5,541,313; 5,545,730; 5,552,538; 5,578,717, 5,580,731; 5,591,584; 5,109,124; 5,118,802; 5,138,045; 5,414,077; 5,486,603; 5,512,439; 5,578,718; 5,608,046; 4,587,044; 4,605,735; 4,667,025; 4,762,779; 4,789,737; 4,824,941; 4,835,263; 4,876,335; 4,904,582; 4,958,013; 5,082,830; 5,112,963; 5,214,136; 5,082,830; 5,112,963; 5,214,136; 5,245,022; 5,254,469; 5,258,506; 5,262,536; 5,272,250; 5,292,873; 5,317,098; 5,371,241, 5,391,723; 5,416,203, 5,451,463; 5,510,475; 5,512,667; 5,514,785; 5,565,552; 5,567,810; 5,574,142; 5,585,481; 5,587,371; 5,595,726; 5,597,696; 5,599,923; 5,599,928 and 5,688,941; 6,294,664; 6,320,017; 6,576,752; 6,783,931; 6,900,297; 7,037,646; 8,106,022, the entire contents of each of which are hereby incorporated herein by reference.

[0723] It is not necessary for all positions in a given compound to be uniformly modified, and in fact more than one of the aforementioned modifications can be incorporated in a single compound or even at a single nucleoside within an iRNA. The present invention also includes iRNA compounds that are chimeric compounds.

[0724] “Chimeric” iRNA compounds or “chimeras,” in the context of this invention, are iRNA compounds, preferably dsRNAs, which contain two or more chemically distinct regions, each made up of at least one monomer unit, i.e., a nucleotide in the case of a dsRNA compound. These iRNAs typically contain at least one region wherein the RNA is modified so as to confer upon the iRNA increased resistance to nuclease degradation, increased cellular uptake, and/or increased binding affinity for the target nucleic acid. An additional region of the iRNA can serve as a substrate for enzymes capable of cleaving RNA:DNA or RNA:RNA hybrids. By way of example, RNase H is a cellular endonuclease which cleaves the RNA strand of an RNA:DNA duplex. Activation of RNase H, therefore, results in cleavage of the RNA target, thereby greatly enhancing the efficiency of iRNA inhibition of gene expression. Consequently, comparable results can often be obtained with shorter iRNAs when chimeric dsRNAs are used, compared to phosphorothioate deoxy dsRNAs hybridizing to the same target region. Cleavage of the RNA target can be routinely detected by gel electrophoresis and, if necessary, associated nucleic acid hybridization techniques known in the art.

[0725] In certain instances, the RNA of an iRNA can be modified by a non-ligand group. A number of non-ligand molecules have been conjugated to iRNAs in order to enhance the activity, cellular distribution or cellular uptake of the iRNA, and procedures for performing such conjugations are available in the scientific literature. Such non-ligand moieties have included lipid moieties, such as cholesterol (Kubo, T. et al., Biochem. Biophys. Res. Comm, 2007, 365(1):54-61; Letsinger et al., Proc. Natl. Acad. Sci. USA, 1989, 86:6553), cholic acid (Manoharan et al., Bioorg. Med. Chem. Lett., 1994, 4:1053), a thioether, e.g., hexyl-S-tritylthiol (Manoharan et al., Ann. N.Y. Acad. Sci., 1992, 660:306; Manoharan et al., Bioorg. Med. Chem. Let., 1993, 3:2765), a thiocholesterol (Oberhauser et al., Nucl. Acids Res., 1992, 20:533), an aliphatic chain, e.g., dodecandiol or undecyl residues (Saison-Behmoaras et al., EMBO J., 1991, 10:111; Kabanov et al., FEBS Lett., 1990, 259:327; Svinarchuk et al., Biochimie, 1993, 75:49), a phospholipid, e.g., di-hexadecyl-rac-glycerol or triethylammonium 1,2-di-O-hexadecyl-rac-glycero-3-H-phosphonate (Manoharan et al., Tetrahedron Lett., 1995, 36:3651; Shea et al., Nucl. Acids Res., 1990, 18:3777), a polyamine or a polyethylene glycol chain (Manoharan et al., Nucleosides & Nucleotides, 1995, 14:969), or adamantane acetic acid (Manoharan et al., Tetrahedron Lett., 1995, 36:3651), a palmityl moiety (Mishra et al., Biochim Biophys. Acta, 1995, 1264:229), or an octadecylamine or hexylamino-carbonyl-oxycholesterol moiety (Crooke et al., J. Pharmacol. Exp. Ther., 1996, 277:923). Representative United States patents that teach the preparation of such RNA conjugates have been listed above. Typical conjugation protocols involve the synthesis of an RNAs bearing an aminolinker at one or more positions of the sequence. The amino group is then reacted with the molecule being conjugated using appropriate coupling or activating reagents. The conjugation reaction can be performed either with the RNA still bound to the solid support or following cleavage of the RNA, in solution phase. Purification of the RNA conjugate by HPLC typically affords the pure conjugate.

### IV. Delivery of an iRNA of the Invention

[0726] The delivery of an iRNA of the invention to a cell e.g., a cell within a subject, such as a human subject (e.g., a subject in need thereof, such as a subject having a disorder of lipid metabolism) can be achieved in a number of different ways. For example, delivery may be performed by contacting a cell with an iRNA of the invention either in vitro or in vivo. In vivo delivery may also be performed directly by administering a composition comprising an iRNA, e.g., a dsRNA, to a subject. Alternatively, in vivo delivery may be performed indirectly by administering one or more vectors that encode and direct the expression of the iRNA. These alternatives are discussed further below.

[0727] In the methods of the invention which include a first dsRNA agent targeting LDHA and a second dsRNA agent targeting HAO1 are covalently attached (i.e., a dual targeting RNAi agent), the delivery of the first agent may be the same or different than the delivery of the second agent.

[0728] In general, any method of delivering a nucleic acid molecule (in vitro or in vivo) can be adapted for use with an iRNA of the invention (see e.g., Akhtar S. and Julian R L., (1992) Trends Cell. Biol. 2(5):139-144 and WO94/02595, which are incorporated herein by reference in their entireties). For in vivo delivery, factors to consider in order to deliver an iRNA molecule include, for example, biological stability of the delivered molecule, prevention of non-specific effects, and accumulation of the delivered molecule in the target tissue. The non-specific effects of an iRNA can be minimized by local administration, for example, by direct injection or implantation into a tissue or topically administering the preparation. Local administration to a treatment site maximizes local concentration of the agent, limits the exposure of the agent to systemic tissues that can otherwise be harmed by the agent or that can degrade the agent, and permits a lower total dose of the iRNA molecule to be administered. Several studies have shown successful knockdown of gene products when an iRNA is administered locally. For example, intraocular delivery of a VEGF dsRNA by intravitreal injection in cynomolgus monkeys (Tolentino, M J. et al., (2004) Retina 24:132-138) and subretinal injections in mice (Reich, S J. et al. (2003) Mol. Vis. 9:210-216) were both shown to prevent neovascularization in an experimental model of age-related macular degeneration. In addition, direct intratumoral injection of a dsRNA in mice reduces tumor volume (Pille, J. et al. (2005) Mol. Ther. 11:267-274) and can prolong survival of tumor-bearing mice (Kim, W J. et al., (2006) Mol. Ther. 14:343-350; Li, S. et al., (2007) Mol. Ther. 15:515-523). RNA interference has also shown success with local delivery to the CNS by direct injection (Dorn, G. et al., (2004) Nucleic Acids 32:e49; Tan, P H. et al. (2005) Gene Ther. 12:59-66; Makimura, H. et a.l (2002) BMC Neurosci. 3:18; Shishkina, G T., et al. (2004) Neuroscience 129:521-528; Thakker, E R., et al. (2004) Proc. Natl. Acad. Sci. U.S.A. 101:17270-17275; Akaneya, Y., et al. (2005) J. Neurophysiol. 93:594-602) and to the lungs by intranasal administration (Howard, K A. et al., (2006) Mol. Ther. 14:476-484; Zhang, X. et al., (2004) J. Biol. Chem. 279:10677-10684; Bitko, V. et al., (2005) Nat. Med. 11:50-55). For administering an iRNA systemically for the treatment of a disease, the RNA can be modified or alternatively delivered using a drug delivery system; both methods act to prevent the rapid degradation of the dsRNA by endo- and exo-nucleases in vivo. Modification of the RNA or the pharmaceutical carrier can also permit targeting of the iRNA composition to the target tissue and avoid undesirable off-target effects. iRNA molecules can be modified by chemical conjugation to lipophilic groups such as cholesterol to enhance cellular uptake and prevent degradation. For example, an iRNA directed against ApoB conjugated to a lipophilic cholesterol moiety was injected systemically into mice and resulted in knockdown of apoB mRNA in both the liver and jejunum (Soutschek, J. et al., (2004) Nature 432:173-178). Conjugation of an iRNA to an aptamer has been shown to inhibit tumor growth and mediate tumor regression in a mouse model of prostate cancer (McNamara, J O. et al., (2006) Nat. Biotechnol. 24:1005-1015). In an alternative embodiment, the iRNA can be delivered using drug delivery systems such as a nanoparticle, a dendrimer, a polymer, liposomes, or a cationic delivery system. Positively charged cationic delivery systems facilitate binding of an iRNA molecule (negatively charged) and also enhance interactions at the negatively charged cell membrane to permit efficient uptake of an iRNA by the cell. Cationic lipids, dendrimers, or polymers can either be bound to an iRNA, or induced to form a vesicle or micelle (see e.g., Kim S H. et al., (2008) Journal of Controlled Release 129(2):107-116) that encases an iRNA. The formation of vesicles or micelles further prevents degradation of the iRNA when administered systemically. Methods for making and administering cationic-iRNA complexes are well within the abilities of one skilled in the art (see e.g., Sorensen, D R., et al. (2003) J. Mol. Biol 327:761-766; Verma, U N. et al., (2003) Clin. Cancer Res. 9:1291-1300; Arnold, A S et al., (2007) J. Hypertens. 25:197-205, which are incorporated herein by reference in their entirety). Some non-limiting examples of drug delivery systems useful for systemic delivery of iRNAs include DOTAP (Sorensen, D R., et al (2003), supra; Verma, U N. et al., (2003), supra), Oligofectamine, “solid nucleic acid lipid particles” (Zimmermann, T S. et al., (2006) Nature 441:111-114), cardiolipin (Chien, P Y. et al., (2005) Cancer Gene Ther. 12:321-328; Pal, A. et al., (2005) Int J. Oncol. 26:1087-1091), polyethyleneimine (Bonnet M E. et al., (2008) Pharm. Res. August 16 Epub ahead of print; Aigner, A. (2006) J. Biomed. Biotechnol. 71659), Arg-Gly-Asp (RGD) peptides (Liu, S. (2006) Mol. Pharm. 3:472-487), and polyamidoamines (Tomalia, D A. et al., (2007) Biochem. Soc. Trans. 35:61-67; Yoo, H. et al., (1999) Pharm. Res. 16:1799-1804). In some embodiments, an iRNA forms a complex with cyclodextrin for systemic administration. Methods for administration and pharmaceutical compositions of iRNAs and cyclodextrins can be found in U.S. Pat. No. 7,427,605, which is herein incorporated by reference in its entirety.

[0729] A. Vector Encoded iRNAs of the Invention

[0730] iRNA targeting the LDHA gene and iRNA targeting LDHA and HAO1 can be expressed from transcription units inserted into DNA or RNA vectors (see, e.g., Couture, A, et al., TIG. (1996), 12:5-10; Skillern, A., et al., International PCT Publication No. WO 00/22113, Conrad, International PCT Publication No. WO 00/22114, and Conrad, U.S. Pat. No. 6,054,299). Expression can be transient (on the order of hours to weeks) or sustained (weeks to months or longer), depending upon the specific construct used and the target tissue or cell type. These transgenes can be introduced as a linear construct, a circular plasmid, or a viral vector, which can be an integrating or non-integrating vector. The transgene can also be constructed to permit it to be inherited as an extrachromosomal plasmid (Gassmann, et al., (1995) Proc. Natl. Acad. Sci. USA 92:1292).

[0731] The individual strand or strands of an iRNA can be transcribed from a promoter on an expression vector. Where two separate strands are to be expressed to generate, for example, a dsRNA, two separate expression vectors can be co-introduced (e.g., by transfection or infection) into a target cell. Alternatively each individual strand of a dsRNA can be transcribed by promoters both of which are located on the same expression plasmid. In one embodiment, a dsRNA is expressed as inverted repeat polynucleotides joined by a linker polynucleotide sequence such that the dsRNA has a stem and loop structure.

[0732] iRNA expression vectors are generally DNA plasmids or viral vectors. Expression vectors compatible with eukaryotic cells, preferably those compatible with vertebrate cells, can be used to produce recombinant constructs for the expression of an iRNA as described herein. Eukaryotic cell expression vectors are well known in the art and are available from a number of commercial sources. Typically, such vectors are provided containing convenient restriction sites for insertion of the desired nucleic acid segment. Delivery of iRNA expressing vectors can be systemic, such as by intravenous or intramuscular administration, by administration to target cells ex-planted from the patient followed by reintroduction into the patient, or by any other means that allows for introduction into a desired target cell.

[0733] Viral vector systems which can be utilized with the methods and compositions described herein include, but are not limited to, (a) adenovirus vectors; (b) retrovirus vectors, including but not limited to lentiviral vectors, moloney murine leukemia virus, etc.; (c) adeno-associated virus vectors; (d) herpes simplex virus vectors; (e) SV 40 vectors; (f) polyoma virus vectors; (g) papilloma virus vectors; (h) picornavirus vectors; (i) pox virus vectors such as an orthopox, e.g., vaccinia virus vectors or avipox, e.g. canary pox or fowl pox; and (j) a helper-dependent or gutless adenovirus. Replication-defective viruses can also be advantageous. Different vectors will or will not become incorporated into the cells' genome. The constructs can include viral sequences for transfection, if desired. Alternatively, the construct can be incorporated into vectors capable of episomal replication, e.g. EPV and EBV vectors. Constructs for the recombinant expression of an iRNA will generally require regulatory elements, e.g., promoters, enhancers, etc., to ensure the expression of the iRNA in target cells. Other aspects to consider for vectors and constructs are known in the art.

### V. Pharmaceutical Compositions of the Invention

[0734] The present invention also includes pharmaceutical compositions and formulations which include the iRNAs of the invention. Accordingly, in one embodiment, provided herein are pharmaceutical compositions comprising a double stranded ribonucleic acid (dsRNA) agent that inhibits expression of lactic acid dehydrogenase A (LDHA) in a cell, such as a liver cell, wherein the dsRNA agent comprises a sense strand and an antisense strand, wherein the sense strand comprises at least 15 contiguous nucleotides differing by no more than 3 nucleotides from the nucleotide sequence of SEQ ID NO:1, and said antisense strand comprises at least 15 contiguous nucleotides differing by no more than 3 nucleotides from the nucleotide sequence of SEQ ID NO:2; and a pharmaceutically acceptable carrier.

[0735] In another embodiment, provided herein are pharmaceutical compositions comprising a dsRNA agent that inhibits expression of lactic acid dehydrogenase A (LDHA) in a cell, such as a liver cell, wherein the dsRNA agent comprises a sense strand and an antisense strand, the antisense strand comprising a region of complementarity which comprises at least 15 contiguous nucleotides differing by no more than 3 nucleotides from any one of the antisense sequences listed in any one of Tables 2-5; and a pharmaceutically acceptable carrier.

[0736] In one embodiment, provided herein are pharmaceutical compositions comprising a first double stranded ribonucleic acid (dsRNA) agent that inhibits expression of lactic acid dehydrogenase A (LDHA) in a cell, such as a liver cell, comprising a sense strand and an antisense strand, wherein the sense strand comprises at least 15 contiguous nucleotides differing by no more than 3 nucleotides from the nucleotide sequence of SEQ ID NO:1, and the antisense strand comprises at least 15 contiguous nucleotides differing by no more than 3 nucleotides from the nucleotide sequence of SEQ ID NO:2; and a second double stranded ribonucleic acid (dsRNA) agent that inhibits expression of hydroxyacid oxidase 1 (glycolate oxidase) (HAO1) in a cell, such as a liver cell, comprising a sense strand and an antisense strand, wherein the sense strand comprises at least 15 contiguous nucleotides differing by no more than 3 nucleotides from the nucleotide sequence of SEQ ID NO:21, and the antisense strand comprises at least 15 contiguous nucleotides differing by no more than 3 nucleotides from the nucleotide sequence of SEQ ID NO:22; and a pharmaceutically acceptable carrier.

[0737] In another embodiment, provided herein are pharmaceutical compositions a first double stranded ribonucleic acid (dsRNA) agent that inhibits expression of lactic acid dehydrogenase A (LDHA) in a cell, such as a liver cell, comprising a sense strand and an antisense strand, the antisense strand comprising a region of complementarity which comprises at least 15 contiguous nucleotides differing by no more than 3 nucleotides from any one of the antisense sequences listed in any one of Tables 2-5; and a second double stranded ribonucleic acid (dsRNA) agent that inhibits expression of hydroxyacid oxidase 1 (glycolate oxidase) (HAO1) in a cell, such as a liver cell, comprising a sense strand and an antisense strand, the antisense strand comprising a region of complementarity which comprises at least 15 contiguous nucleotides differing by no more than 3 nucleotides from any one of the antisense sequences listed in any one of Tables 7-14.

[0738] In yet another embodiment, the present invention provides pharmaceutical compositions and formulations comprising a dual targeting RNAi agent of the invention, and a pharmaceutically acceptable carrier.

[0739] The pharmaceutical compositions containing the iRNA of the invention are useful for treating a disease or disorder associated with the expression or activity of an LDHA gene or an LDHA gene and an HAO1 gene, e.g., an oxalate pathway-associated disease, disorder, or condition.

[0740] Such pharmaceutical compositions are formulated based on the mode of delivery. One example is compositions that are formulated for systemic administration via parenteral delivery, e.g., by intravenous (IV) or for subcutaneous delivery. Another example is compositions that are formulated for direct delivery into the liver, e.g., by infusion into the liver, such as by continuous pump infusion.

[0741] The pharmaceutical compositions of the invention may be administered in dosages sufficient to inhibit expression of an LDHA gene or an LDHA gene and an HAO1 gene. In general, a suitable dose of an iRNA of the invention will be in the range of about 0.001 to about 200.0 milligrams per kilogram body weight of the recipient per day, generally in the range of about 1 to 50 mg per kilogram body weight per day. Typically, a suitable dose of an iRNA of the invention will be in the range of about 0.1 mg/kg to about 5.0 mg/kg, preferably about 0.3 mg/kg and about 3.0 mg/kg.

[0742] In the methods of the invention which include a first dsRNA agent targeting LDHA and a second dsRNA agent targeting HAO1, the first agent and the second agent may be present in the same pharmaceutical formulation or separate pharmaceutical formulations.

[0743] A repeat-dose regimine may include administration of a therapeutic amount of iRNA on a regular basis, such as every other day to once a year. In certain embodiments, the iRNA is administered about once per month to about once per quarter (i.e., about once every three months).

[0744] After an initial treatment regimen, the treatments can be administered on a less frequent basis.

[0745] The skilled artisan will appreciate that certain factors can influence the dosage and timing required to effectively treat a subject, including but not limited to the severity of the disease or disorder, previous treatments, the general health and/or age of the subject, and other diseases present. Moreover, treatment of a subject with a therapeutically effective amount of a composition can include a single treatment or a series of treatments. Estimates of effective dosages and in vivo half-lives for the individual iRNAs encompassed by the invention can be made using conventional methodologies or on the basis of in vivo testing using an appropriate animal model, as described elsewhere herein.

[0746] Advances in mouse genetics have generated a number of mouse models for the study of various human diseases, such as an oxalate pathway-associated disease, disorder, or condition that would benefit from reduction in the expression of LDHA and/or LDHA and HAO1. Such models can be used for in vivo testing of iRNA, as well as for determining a therapeutically effective dose. Suitable mouse models are known in the art and include, for example, mouse models which may include mutations or deletions in the AGXT or GRHPR genes (see, e.g., Salido E C, et al. (2006) PNAS 103(48): 18249-18254 and Knight J, et al. (2012) Am. J. Physiol. Renal Physiol. 302: F688-F693); a PH3 mouse model (see, e.g., Li, et al. (2015) biochem Biophys Acta 1852(12):2700); and the ethylene glycol urolithiasis mouse model.

[0747] The pharmaceutical compositions of the present invention can be administered in a number of ways depending upon whether local or systemic treatment is desired and upon the area to be treated. Administration can be topical (e.g., by a transdermal patch), pulmonary, e.g., by inhalation or insufflation of powders or aerosols, including by nebulizer; intratracheal, intranasal, epidermal and transdermal, oral or parenteral. Parenteral administration includes intravenous, intraarterial, subcutaneous, intraperitoneal or intramuscular injection or infusion; subdermal, e.g., via an implanted device; or intracranial, e.g., by intraparenchymal, intrathecal or intraventricular, administration.

[0748] The iRNA can be delivered in a manner to target a particular cell or tissue, such as the liver (e.g., the hepatocytes of the liver).

[0749] Pharmaceutical compositions and formulations for topical administration can include transdermal patches, ointments, lotions, creams, gels, drops, suppositories, sprays, liquids and powders. Conventional pharmaceutical carriers, aqueous, powder or oily bases, thickeners and the like can be necessary or desirable. Coated condoms, gloves and the like can also be useful. Suitable topical formulations include those in which the iRNAs featured in the invention are in admixture with a topical delivery agent such as lipids, liposomes, fatty acids, fatty acid esters, steroids, chelating agents and surfactants. Suitable lipids and liposomes include neutral (e.g., dioleoylphosphatidyl DOPE ethanolamine, dimyristoylphosphatidyl choline DMPC, distearolyphosphatidyl choline) negative (e.g., dimyristoylphosphatidyl glycerol DMPG) and cationic (e.g., dioleoyltetramethylaminopropyl DOTAP and dioleoylphosphatidyl ethanolamine DOTMA). iRNAs featured in the invention can be encapsulated within liposomes or can form complexes thereto, in particular to cationic liposomes. Alternatively, iRNAs can be complexed to lipids, in particular to cationic lipids. Suitable fatty acids and esters include but are not limited to arachidonic acid, oleic acid, eicosanoic acid, lauric acid, caprylic acid, capric acid, myristic acid, palmitic acid, stearic acid, linoleic acid, linolenic acid, dicaprate, tricaprate, monoolein, dilaurin, glyceryl 1-monocaprate, 1-dodecylazacycloheptan-2-one, an acylcarnitine, an acylcholine, or a C₁₋₂₀ alkyl ester (e.g., isopropylmyristate IPM), monoglyceride, diglyceride or pharmaceutically acceptable salt thereof. Topical formulations are described in detail in U.S. Pat. No. 6,747,014, which is incorporated herein by reference.

[0750] Compositions and formulations for oral administration include powders or granules, microparticulates, nanoparticulates, suspensions or solutions in water or non-aqueous media, capsules, gel capsules, sachets, tablets or minitablets. Thickeners, flavoring agents, diluents, emulsifiers, dispersing aids or binders can be desirable. In some embodiments, oral formulations are those in which dsRNAs featured in the invention are administered in conjunction with one or more penetration enhancer surfactants and chelators. Suitable surfactants include fatty acids and/or esters or salts thereof, bile acids and/or salts thereof. Suitable bile acids/salts include chenodeoxycholic acid (CDCA) and ursodeoxychenodeoxycholic acid (UDCA), cholic acid, dehydrocholic acid, deoxycholic acid, glucholic acid, glycholic acid, glycodeoxycholic acid, taurocholic acid, taurodeoxycholic acid, sodium tauro-24,25-dihydro-fusidate and sodium glycodihydrofusidate. Suitable fatty acids include arachidonic acid, undecanoic acid, oleic acid, lauric acid, caprylic acid, capric acid, myristic acid, palmitic acid, stearic acid, linoleic acid, linolenic acid, dicaprate, tricaprate, monoolein, dilaurin, glyceryl 1-monocaprate, 1-dodecylazacycloheptan-2-one, an acylcarnitine, an acylcholine, or a monoglyceride, a diglyceride or a pharmaceutically acceptable salt thereof (e.g., sodium). In some embodiments, combinations of penetration enhancers are used, for example, fatty acids/salts in combination with bile acids/salts. One exemplary combination is the sodium salt of lauric acid, capric acid and UDCA. Further penetration enhancers include polyoxyethylene-9-lauryl ether, polyoxyethylene-20-cetyl ether. DsRNAs featured in the invention can be delivered orally, in granular form including sprayed dried particles, or complexed to form micro or nanoparticles. DsRNA complexing agents include poly-amino acids; polyimines; polyacrylates; polyalkylacrylates, polyoxethanes, polyalkylcyanoacrylates; cationized gelatins, albumins, starches, acrylates, polyethyleneglycols (PEG) and starches; polyalkylcyanoacrylates; DEAE-derivatized polyimines, pollulans, celluloses and starches. Suitable complexing agents include chitosan, N-trimethylchitosan, poly-L-lysine, polyhistidine, polyornithine, polyspermines, protamine, polyvinylpyridine, polythiodiethylaminomethylethylene P(TDAE), polyaminostyrene (e.g., p-amino), poly(methylcyanoacrylate), poly(ethylcyanoacrylate), poly(butylcyanoacrylate), poly(isobutylcyanoacrylate), poly(isohexylcynaoacrylate), DEAE-methacrylate, DEAE-hexylacrylate, DEAE-acrylamide, DEAE-albumin and DEAE-dextran, polymethylacrylate, polyhexylacrylate, poly(D,L-lactic acid), poly(DL-lactic-co-glycolic acid (PLGA), alginate, and polyethyleneglycol (PEG). Oral formulations for dsRNAs and their preparation are described in detail in U.S. Pat. No. 6,887,906, US Publn. No. 20030027780, and U.S. Pat. No. 6,747,014, each of which is incorporated herein by reference.

[0751] Compositions and formulations for parenteral, intraparenchymal (into the brain), intrathecal, intraventricular or intrahepatic administration can include sterile aqueous solutions which can also contain buffers, diluents and other suitable additives such as, but not limited to, penetration enhancers, carrier compounds and other pharmaceutically acceptable carriers or excipients.

[0752] Pharmaceutical compositions of the present invention include, but are not limited to, solutions, emulsions, and liposome-containing formulations. These compositions can be generated from a variety of components that include, but are not limited to, preformed liquids, self-emulsifying solids and self-emulsifying semisolids. Particularly preferred are formulations that target the liver when treating hepatic disorders such as hepatic carcinoma.

[0753] The pharmaceutical formulations of the present invention, which can conveniently be presented in unit dosage form, can be prepared according to conventional techniques well known in the pharmaceutical industry. Such techniques include the step of bringing into association the active ingredients with the pharmaceutical carrier(s) or excipient(s). In general, the formulations are prepared by uniformly and intimately bringing into association the active ingredients with liquid carriers or finely divided solid carriers or both, and then, if necessary, shaping the product.

[0754] The compositions of the present invention can be formulated into any of many possible dosage forms such as, but not limited to, tablets, capsules, gel capsules, liquid syrups, soft gels, suppositories, and enemas. The compositions of the present invention can also be formulated as suspensions in aqueous, non-aqueous or mixed media. Aqueous suspensions can further contain substances which increase the viscosity of the suspension including, for example, sodium carboxymethylcellulose, sorbitol and/or dextran. The suspension can also contain stabilizers.

[0755] A. Additional Formulations

[0756] i. Emulsions

[0757] The compositions of the present invention can be prepared and formulated as emulsions. Emulsions are typically heterogeneous systems of one liquid dispersed in another in the form of droplets usually exceeding 0.1 μm in diameter (see e.g., Ansel's Pharmaceutical Dosage Forms and Drug Delivery Systems, Allen, L V., Popovich N G., and Ansel H C., 2004, Lippincott Williams & Wilkins (8th ed.), New York, N.Y.; Idson, in Pharmaceutical Dosage Forms, Lieberman, Rieger and Banker (Eds.), 1988, Marcel Dekker, Inc., New York, N.Y., volume 1, p. 199; Rosoff, in Pharmaceutical Dosage Forms, Lieberman, Rieger and Banker (Eds.), 1988, Marcel Dekker, Inc., New York, N.Y., Volume 1, p. 245; Block in Pharmaceutical Dosage Forms, Lieberman, Rieger and Banker (Eds.), 1988, Marcel Dekker, Inc., New York, N.Y., volume 2, p. 335; Higuchi et al., in Remington's Pharmaceutical Sciences, Mack Publishing Co., Easton, Pa., 1985, p. 301). Emulsions are often biphasic systems comprising two immiscible liquid phases intimately mixed and dispersed with each other. In general, emulsions can be of either the water-in-oil (w/o) or the oil-in-water (o/w) variety. When an aqueous phase is finely divided into and dispersed as minute droplets into a bulk oily phase, the resulting composition is called a water-in-oil (w/o) emulsion. Alternatively, when an oily phase is finely divided into and dispersed as minute droplets into a bulk aqueous phase, the resulting composition is called an oil-in-water (o/w) emulsion. Emulsions can contain additional components in addition to the dispersed phases, and the active drug which can be present as a solution in either aqueous phase, oily phase or itself as a separate phase. Pharmaceutical excipients such as emulsifiers, stabilizers, dyes, and anti-oxidants can also be present in emulsions as needed. Pharmaceutical emulsions can also be multiple emulsions that are comprised of more than two phases such as, for example, in the case of oil-in-water-in-oil (o/w/o) and water-in-oil-in-water (w/o/w) emulsions. Such complex formulations often provide certain advantages that simple binary emulsions do not. Multiple emulsions in which individual oil droplets of an o/w emulsion enclose small water droplets constitute a w/o/w emulsion. Likewise a system of oil droplets enclosed in globules of water stabilized in an oily continuous phase provides an o/w/o emulsion.

[0758] Emulsions are characterized by little or no thermodynamic stability. Often, the dispersed or discontinuous phase of the emulsion is well dispersed into the external or continuous phase and maintained in this form through the means of emulsifiers or the viscosity of the formulation. Either of the phases of the emulsion can be a semisolid or a solid, as is the case of emulsion-style ointment bases and creams. Other means of stabilizing emulsions entail the use of emulsifiers that can be incorporated into either phase of the emulsion. Emulsifiers can broadly be classified into four categories: synthetic surfactants, naturally occurring emulsifiers, absorption bases, and finely dispersed solids (see e.g., Ansel's Pharmaceutical Dosage Forms and Drug Delivery Systems, Allen, L V., Popovich N G., and Ansel H C., 2004, Lippincott Williams & Wilkins (8th ed.), New York, N.Y.; Idson, in Pharmaceutical Dosage Forms, Lieberman, Rieger and Banker (Eds.), 1988, Marcel Dekker, Inc., New York, N.Y., volume 1, p. 199).

[0759] Synthetic surfactants, also known as surface active agents, have found wide applicability in the formulation of emulsions and have been reviewed in the literature (see e.g., Ansel's Pharmaceutical Dosage Forms and Drug Delivery Systems, Allen, L V., Popovich N G., and Ansel H C., 2004, Lippincott Williams & Wilkins (8th ed.), New York, N.Y.; Rieger, in Pharmaceutical Dosage Forms, Lieberman, Rieger and Banker (Eds.), 1988, Marcel Dekker, Inc., New York, N.Y., volume 1, p. 285; Idson, in Pharmaceutical Dosage Forms, Lieberman, Rieger and Banker (Eds.), Marcel Dekker, Inc., New York, N.Y., 1988, volume 1, p. 199). Surfactants are typically amphiphilic and comprise a hydrophilic and a hydrophobic portion. The ratio of the hydrophilic to the hydrophobic nature of the surfactant has been termed the hydrophile/lipophile balance (HLB) and is a valuable tool in categorizing and selecting surfactants in the preparation of formulations. Surfactants can be classified into different classes based on the nature of the hydrophilic group: nonionic, anionic, cationic and amphoteric (see e.g., Ansel's Pharmaceutical Dosage Forms and Drug Delivery Systems, Allen, L V., Popovich N G., and Ansel H C., 2004, Lippincott Williams & Wilkins (8th ed.), New York, N.Y. Rieger, in Pharmaceutical Dosage Forms, Lieberman, Rieger and Banker (Eds.), 1988, Marcel Dekker, Inc., New York, N.Y., volume 1, p. 285).

[0760] Naturally occurring emulsifiers used in emulsion formulations include lanolin, beeswax, phosphatides, lecithin and acacia. Absorption bases possess hydrophilic properties such that they can soak up water to form w/o emulsions yet retain their semisolid consistencies, such as anhydrous lanolin and hydrophilic petrolatum. Finely divided solids have also been used as good emulsifiers especially in combination with surfactants and in viscous preparations. These include polar inorganic solids, such as heavy metal hydroxides, nonswelling clays such as bentonite, attapulgite, hectorite, kaolin, montmorillonite, colloidal aluminum silicate and colloidal magnesium aluminum silicate, pigments and nonpolar solids such as carbon or glyceryl tristearate.

[0761] A large variety of non-emulsifying materials are also included in emulsion formulations and contribute to the properties of emulsions. These include fats, oils, waxes, fatty acids, fatty alcohols, fatty esters, humectants, hydrophilic colloids, preservatives and antioxidants (Block, in Pharmaceutical Dosage Forms, Lieberman, Rieger and Banker (Eds.), 1988, Marcel Dekker, Inc., New York, N.Y., volume 1, p. 335; Idson, in Pharmaceutical Dosage Forms, Lieberman, Rieger and Banker (Eds.), 1988, Marcel Dekker, Inc., New York, N.Y., volume 1, p. 199).

[0762] Hydrophilic colloids or hydrocolloids include naturally occurring gums and synthetic polymers such as polysaccharides (for example, acacia, agar, alginic acid, carrageenan, guar gum, karaya gum, and tragacanth), cellulose derivatives (for example, carboxymethylcellulose and carboxypropylcellulose), and synthetic polymers (for example, carbomers, cellulose ethers, and carboxyvinyl polymers). These disperse or swell in water to form colloidal solutions that stabilize emulsions by forming strong interfacial films around the dispersed-phase droplets and by increasing the viscosity of the external phase.

[0763] Since emulsions often contain a number of ingredients such as carbohydrates, proteins, sterols and phosphatides that can readily support the growth of microbes, these formulations often incorporate preservatives. Commonly used preservatives included in emulsion formulations include methyl paraben, propyl paraben, quaternary ammonium salts, benzalkonium chloride, esters of p-hydroxybenzoic acid, and boric acid. Antioxidants are also commonly added to emulsion formulations to prevent deterioration of the formulation. Antioxidants used can be free radical scavengers such as tocopherols, alkyl gallates, butylated hydroxyanisole, butylated hydroxytoluene, or reducing agents such as ascorbic acid and sodium metabisulfite, and antioxidant synergists such as citric acid, tartaric acid, and lecithin.

[0764] The application of emulsion formulations via dermatological, oral and parenteral routes and methods for their manufacture have been reviewed in the literature (see e.g., Ansel's Pharmaceutical Dosage Forms and Drug Delivery Systems, Allen, L V., Popovich N G., and Ansel H C., 2004, Lippincott Williams & Wilkins (8th ed.), New York, N.Y.; Idson, in Pharmaceutical Dosage Forms, Lieberman, Rieger and Banker (Eds.), 1988, Marcel Dekker, Inc., New York, N.Y., volume 1, p. 199). Emulsion formulations for oral delivery have been very widely used because of ease of formulation, as well as efficacy from an absorption and bioavailability standpoint (see e.g., Ansel's Pharmaceutical Dosage Forms and Drug Delivery Systems, Allen, L V., Popovich N G., and Ansel H C., 2004, Lippincott Williams & Wilkins (8th ed.), New York, N.Y.; Rosoff, in Pharmaceutical Dosage Forms, Lieberman, Rieger and Banker (Eds.), 1988, Marcel Dekker, Inc., New York, N.Y., volume 1, p. 245; Idson, in Pharmaceutical Dosage Forms, Lieberman, Rieger and Banker (Eds.), 1988, Marcel Dekker, Inc., New York, N.Y., volume 1, p. 199). Mineral-oil base laxatives, oil-soluble vitamins and high fat nutritive preparations are among the materials that have commonly been administered orally as o/w emulsions.

[0765] ii. Microemulsions

[0766] In one embodiment of the present invention, the compositions of iRNAs and nucleic acids are formulated as microemulsions. A microemulsion can be defined as a system of water, oil and amphiphile which is a single optically isotropic and thermodynamically stable liquid solution (see e.g., Ansel's Pharmaceutical Dosage Forms and Drug Delivery Systems, Allen, L V., Popovich N G., and Ansel H C., 2004, Lippincott Williams & Wilkins (8th ed.), New York, N.Y.; Rosoff, in Pharmaceutical Dosage Forms, Lieberman, Rieger and Banker (Eds.), 1988, Marcel Dekker, Inc., New York, N.Y., volume 1, p. 245). Typically microemulsions are systems that are prepared by first dispersing an oil in an aqueous surfactant solution and then adding a sufficient amount of a fourth component, generally an intermediate chain-length alcohol to form a transparent system. Therefore, microemulsions have also been described as thermodynamically stable, isotropically clear dispersions of two immiscible liquids that are stabilized by interfacial films of surface-active molecules (Leung and Shah, in: Controlled Release of Drugs: Polymers and Aggregate Systems, Rosoff, M., Ed., 1989, VCH Publishers, New York, pages 185-215). Microemulsions commonly are prepared via a combination of three to five components that include oil, water, surfactant, cosurfactant and electrolyte. Whether the microemulsion is of the water-in-oil (w/o) or an oil-in-water (o/w) type is dependent on the properties of the oil and surfactant used and on the structure and geometric packing of the polar heads and hydrocarbon tails of the surfactant molecules (Schott, in Remington's Pharmaceutical Sciences, Mack Publishing Co., Easton, Pa., 1985, p. 271).

[0767] The phenomenological approach utilizing phase diagrams has been extensively studied and has yielded a comprehensive knowledge, to one skilled in the art, of how to formulate microemulsions (see e.g., Ansel's Pharmaceutical Dosage Forms and Drug Delivery Systems, Allen, L V., Popovich N G., and Ansel H C., 2004, Lippincott Williams & Wilkins (8th ed.), New York, N.Y.; Rosoff, in Pharmaceutical Dosage Forms, Lieberman, Rieger and Banker (Eds.), 1988, Marcel Dekker, Inc., New York, N.Y., volume 1, p. 245; Block, in Pharmaceutical Dosage Forms, Lieberman, Rieger and Banker (Eds.), 1988, Marcel Dekker, Inc., New York, N.Y., volume 1, p. 335). Compared to conventional emulsions, microemulsions offer the advantage of solubilizing water-insoluble drugs in a formulation of thermodynamically stable droplets that are formed spontaneously.

[0768] Surfactants used in the preparation of microemulsions include, but are not limited to, ionic surfactants, non-ionic surfactants, Brij 96, polyoxyethylene oleyl ethers, polyglycerol fatty acid esters, tetraglycerol monolaurate (ML310), tetraglycerol monooleate (M0310), hexaglycerol monooleate (P0310), hexaglycerol pentaoleate (P0500), decaglycerol monocaprate (MCA750), decaglycerol monooleate (M0750), decaglycerol sequioleate (S0750), decaglycerol decaoleate (DA0750), alone or in combination with cosurfactants. The cosurfactant, usually a short-chain alcohol such as ethanol, 1-propanol, and 1-butanol, serves to increase the interfacial fluidity by penetrating into the surfactant film and consequently creating a disordered film because of the void space generated among surfactant molecules. Microemulsions can, however, be prepared without the use of cosurfactants and alcohol-free self-emulsifying microemulsion systems are known in the art. The aqueous phase can typically be, but is not limited to, water, an aqueous solution of the drug, glycerol, PEG300, PEG400, polyglycerols, propylene glycols, and derivatives of ethylene glycol. The oil phase can include, but is not limited to, materials such as Captex 300, Captex 355, Capmul MCM, fatty acid esters, medium chain (C8-C12) mono, di, and tri-glycerides, polyoxyethylated glyceryl fatty acid esters, fatty alcohols, polyglycolized glycerides, saturated polyglycolized C8-C10 glycerides, vegetable oils and silicone oil.

[0769] Microemulsions are particularly of interest from the standpoint of drug solubilization and the enhanced absorption of drugs. Lipid based microemulsions (both o/w and w/o) have been proposed to enhance the oral bioavailability of drugs, including peptides (see e.g., U.S. Pat. Nos. 6,191,105; 7,063,860; 7,070,802; 7,157,099; Constantinides et al., Pharmaceutical Research, 1994, 11, 1385-1390; Ritschel, Meth. Find. Exp. Clin. Pharmacol., 1993, 13, 205). Microemulsions afford advantages of improved drug solubilization, protection of drug from enzymatic hydrolysis, possible enhancement of drug absorption due to surfactant-induced alterations in membrane fluidity and permeability, ease of preparation, ease of oral administration over solid dosage forms, improved clinical potency, and decreased toxicity (see e.g., U.S. Pat. Nos. 6,191,105; 7,063,860; 7,070,802; 7,157,099; Constantinides et al., Pharmaceutical Research, 1994, 11, 1385; Ho et al., J. Pharm. Sci., 1996, 85, 138-143). Often microemulsions can form spontaneously when their components are brought together at ambient temperature. This can be particularly advantageous when formulating thermolabile drugs, peptides or iRNAs. Microemulsions have also been effective in the transdermal delivery of active components in both cosmetic and pharmaceutical applications. It is expected that the microemulsion compositions and formulations of the present invention will facilitate the increased systemic absorption of iRNAs and nucleic acids from the gastrointestinal tract, as well as improve the local cellular uptake of iRNAs and nucleic acids.

[0770] Microemulsions of the present invention can also contain additional components and additives such as sorbitan monostearate (Grill 3), Labrasol, and penetration enhancers to improve the properties of the formulation and to enhance the absorption of the iRNAs and nucleic acids of the present invention. Penetration enhancers used in the microemulsions of the present invention can be classified as belonging to one of five broad categories—surfactants, fatty acids, bile salts, chelating agents, and non-chelating non-surfactants (Lee et al., Critical Reviews in Therapeutic Drug Carrier Systems, 1991, p. 92). Each of these classes has been discussed above.

[0771] iii. Microparticles

[0772] an RNAi agent of the invention may be incorporated into a particle, e.g., a microparticle. Microparticles can be produced by spray-drying, but may also be produced by other methods including lyophilization, evaporation, fluid bed drying, vacuum drying, or a combination of these techniques.

[0773] iv. Penetration Enhancers

[0774] In one embodiment, the present invention employs various penetration enhancers to effect the efficient delivery of nucleic acids, particularly iRNAs, to the skin of animals. Most drugs are present in solution in both ionized and nonionized forms. However, usually only lipid soluble or lipophilic drugs readily cross cell membranes. It has been discovered that even non-lipophilic drugs can cross cell membranes if the membrane to be crossed is treated with a penetration enhancer. In addition to aiding the diffusion of non-lipophilic drugs across cell membranes, penetration enhancers also enhance the permeability of lipophilic drugs.

[0775] Penetration enhancers can be classified as belonging to one of five broad categories, i.e., surfactants, fatty acids, bile salts, chelating agents, and non-chelating non-surfactants (see e.g., Malmsten, M. Surfactants and polymers in drug delivery, Informa Health Care, New York, N.Y., 2002; Lee et al., Critical Reviews in Therapeutic Drug Carrier Systems, 1991, p. 92). Each of the above mentioned classes of penetration enhancers are described below in greater detail.

[0776] Surfactants (or “surface-active agents”) are chemical entities which, when dissolved in an aqueous solution, reduce the surface tension of the solution or the interfacial tension between the aqueous solution and another liquid, with the result that absorption of iRNAs through the mucosa is enhanced. In addition to bile salts and fatty acids, these penetration enhancers include, for example, sodium lauryl sulfate, polyoxyethylene-9-lauryl ether and polyoxyethylene-20-cetyl ether) (see e.g., Malmsten, M. Surfactants and polymers in drug delivery, Informa Health Care, New York, N.Y., 2002; Lee et al., Critical Reviews in Therapeutic Drug Carrier Systems, 1991, p. 92); and perfluorochemical emulsions, such as FC-43. Takahashi et al., J. Pharm. Pharmacol., 1988, 40, 252).

[0777] Various fatty acids and their derivatives which act as penetration enhancers include, for example, oleic acid, lauric acid, capric acid (n-decanoic acid), myristic acid, palmitic acid, stearic acid, linoleic acid, linolenic acid, dicaprate, tricaprate, monoolein (1-monooleoyl-rac-glycerol), dilaurin, caprylic acid, arachidonic acid, glycerol 1-monocaprate, 1-dodecylazacycloheptan-2-one, acylcarnitines, acylcholines, C₁₋₂₀ alkyl esters thereof (e.g., methyl, isopropyl and t-butyl), and mono- and di-glycerides thereof (i.e., oleate, laurate, caprate, myristate, palmitate, stearate, linoleate, etc.) (see e.g., Touitou, E., et al. Enhancement in Drug Delivery, CRC Press, Danvers, Mass., 2006; Lee et al., Critical Reviews in Therapeutic Drug Carrier Systems, 1991, p. 92; Muranishi, Critical Reviews in Therapeutic Drug Carrier Systems, 1990, 7, 1-33; El Hariri et al., J. Pharm. Pharmacol., 1992, 44, 651-654).

[0778] The physiological role of bile includes the facilitation of dispersion and absorption of lipids and fat-soluble vitamins (see e.g., Malmsten, M. Surfactants and polymers in drug delivery, Informa Health Care, New York, N.Y., 2002; Brunton, Chapter 38 in: Goodman & Gilman's The Pharmacological Basis of Therapeutics, 9th Ed., Hardman et al. Eds., McGraw-Hill, New York, 1996, pp. 934-935). Various natural bile salts, and their synthetic derivatives, act as penetration enhancers. Thus the term “bile salts” includes any of the naturally occurring components of bile as well as any of their synthetic derivatives. Suitable bile salts include, for example, cholic acid (or its pharmaceutically acceptable sodium salt, sodium cholate), dehydrocholic acid (sodium dehydrocholate), deoxycholic acid (sodium deoxycholate), glucholic acid (sodium glucholate), glycholic acid (sodium glycocholate), glycodeoxycholic acid (sodium glycodeoxycholate), taurocholic acid (sodium taurocholate), taurodeoxycholic acid (sodium taurodeoxycholate), chenodeoxycholic acid (sodium chenodeoxycholate), ursodeoxycholic acid (UDCA), sodium tauro-24,25-dihydro-fusidate (STDHF), sodium glycodihydrofusidate and polyoxyethylene-9-lauryl ether (POE) (see e.g., Malmsten, M. Surfactants and polymers in drug delivery, Informa Health Care, New York, N.Y., 2002; Lee et al., Critical Reviews in Therapeutic Drug Carrier Systems, 1991, page 92; Swinyard, Chapter 39 In: Remington's Pharmaceutical Sciences, 18th Ed., Gennaro, ed., Mack Publishing Co., Easton, Pa., 1990, pages 782-783; Muranishi, Critical Reviews in Therapeutic Drug Carrier Systems, 1990, 7, 1-33; Yamamoto et al., J. Pharm. Exp. Ther., 1992, 263, 25; Yamashita et al., J. Pharm. Sci., 1990, 79, 579-583).

[0779] Chelating agents, as used in connection with the present invention, can be defined as compounds that remove metallic ions from solution by forming complexes therewith, with the result that absorption of iRNAs through the mucosa is enhanced. With regards to their use as penetration enhancers in the present invention, chelating agents have the added advantage of also serving as DNase inhibitors, as most characterized DNA nucleases require a divalent metal ion for catalysis and are thus inhibited by chelating agents (Jarrett, J. Chromatogr., 1993, 618, 315-339). Suitable chelating agents include but are not limited to disodium ethylenediaminetetraacetate (EDTA), citric acid, salicylates (e.g., sodium salicylate, 5-methoxysalicylate and homovanilate), N-acyl derivatives of collagen, laureth-9 and N-amino acyl derivatives of beta-diketones (enamines)(see e.g., Katdare, A. et al., Excipient development for pharmaceutical, biotechnology, and drug delivery, CRC Press, Danvers, Mass., 2006; Lee et al., Critical Reviews in Therapeutic Drug Carrier Systems, 1991, page 92; Muranishi, Critical Reviews in Therapeutic Drug Carrier Systems, 1990, 7, 1-33; Buur et al., J. Control Ra, 1990, 14, 43-51).

[0780] As used herein, non-chelating non-surfactant penetration enhancing compounds can be defined as compounds that demonstrate insignificant activity as chelating agents or as surfactants but that nonetheless enhance absorption of iRNAs through the alimentary mucosa (see e.g., Muranishi, Critical Reviews in Therapeutic Drug Carrier Systems, 1990, 7, 1-33). This class of penetration enhancers includes, for example, unsaturated cyclic ureas, 1-alkyl- and 1-alkenylazacyclo-alkanone derivatives (Lee et al., Critical Reviews in Therapeutic Drug Carrier Systems, 1991, page 92); and non-steroidal anti-inflammatory agents such as diclofenac sodium, indomethacin and phenylbutazone (Yamashita et al., J. Pharm. Pharmacol., 1987, 39, 621-626).

[0781] Agents that enhance uptake of iRNAs at the cellular level can also be added to the pharmaceutical and other compositions of the present invention. For example, cationic lipids, such as lipofectin (Junichi et al, U.S. Pat. No. 5,705,188), cationic glycerol derivatives, and polycationic molecules, such as polylysine (Lollo et al., PCT Application WO 97/30731), are also known to enhance the cellular uptake of dsRNAs. Examples of commercially available transfection reagents include, for example Lipofectamine™ (Invitrogen; Carlsbad, Calif.), Lipofectamine 2000™ (Invitrogen; Carlsbad, Calif.), 293fectin™ (Invitrogen; Carlsbad, Calif.), Cellfectin™ (Invitrogen; Carlsbad, Calif.), DMRIE-C™ (Invitrogen; Carlsbad, Calif.), FreeStyle™ MAX (Invitrogen; Carlsbad, Calif.), Lipofectamine™ 2000 CD (Invitrogen; Carlsbad, Calif.), Lipofectamine™ (Invitrogen; Carlsbad, Calif.), RNAiMAX (Invitrogen; Carlsbad, Calif.), Oligofectamine™ (Invitrogen; Carlsbad, Calif.), Optifect™ (Invitrogen; Carlsbad, Calif.), X-tremeGENE Q2 Transfection Reagent (Roche; Grenzacherstrasse, Switzerland), DOTAP Liposomal Transfection Reagent (Grenzacherstrasse, Switzerland), DOSPER Liposomal Transfection Reagent (Grenzacherstrasse, Switzerland), or Fugene (Grenzacherstrasse, Switzerland), Transfectam® Reagent (Promega; Madison, Wis.), TransFast™ Transfection Reagent (Promega; Madison, Wis.), Tfx™-20 Reagent (Promega; Madison, Wis.), Tfx™-50 Reagent (Promega; Madison, Wis.), DreamFect™ (OZ Biosciences; Marseille, France), EcoTransfect (OZ Biosciences; Marseille, France), TransPass' D1 Transfection Reagent (New England Biolabs; Ipswich, Mass., USA), LyoVec™/LipoGen™ (Invitrogen; San Diego, Calif., USA), PerFectin Transfection Reagent (Genlantis; San Diego, Calif., USA), NeuroPORTER Transfection Reagent (Genlantis; San Diego, Calif., USA), GenePORTER Transfection reagent (Genlantis; San Diego, Calif., USA), GenePORTER 2 Transfection reagent (Genlantis; San Diego, Calif., USA), Cytofectin Transfection Reagent (Genlantis; San Diego, Calif., USA), BaculoPORTER Transfection Reagent (Genlantis; San Diego, Calif., USA), TroganPORTER™ transfection Reagent (Genlantis; San Diego, Calif., USA), RiboFect (Bioline; Taunton, Mass., USA), PlasFect (Bioline; Taunton, Mass., USA), UniFECTOR (B-Bridge International; Mountain View, Calif., USA), SureFECTOR (B-Bridge International; Mountain View, Calif., USA), or HiFect™ (B-Bridge International, Mountain View, Calif., USA), among others.

[0782] Other agents can be utilized to enhance the penetration of the administered nucleic acids, including glycols such as ethylene glycol and propylene glycol, pyrrols such as 2-pyrrol, azones, and terpenes such as limonene and menthone.

[0783] v. Carriers

[0784] Certain compositions of the present invention also incorporate carrier compounds in the formulation. As used herein, “carrier compound” or “carrier” can refer to a nucleic acid, or analog thereof, which is inert (i.e., does not possess biological activity per se) but is recognized as a nucleic acid by in vivo processes that reduce the bioavailability of a nucleic acid having biological activity by, for example, degrading the biologically active nucleic acid or promoting its removal from circulation. The coadministration of a nucleic acid and a carrier compound, typically with an excess of the latter substance, can result in a substantial reduction of the amount of nucleic acid recovered in the liver, kidney or other extracirculatory reservoirs, presumably due to competition between the carrier compound and the nucleic acid for a common receptor. For example, the recovery of a partially phosphorothioate dsRNA in hepatic tissue can be reduced when it is coadministered with polyinosinic acid, dextran sulfate, polycytidic acid or 4-acetamido-4′isothiocyano-stilbene-2,2′-disulfonic acid (Miyao et al., DsRNA Res. Dev., 1995, 5, 115-121; Takakura et al., DsRNA & Nucl. Acid Drug Dev., 1996, 6, 177-183.

[0785] vi. Excipients

[0786] In contrast to a carrier compound, a “pharmaceutical carrier” or “excipient” is a pharmaceutically acceptable solvent, suspending agent or any other pharmacologically inert vehicle for delivering one or more nucleic acids to an animal. The excipient can be liquid or solid and is selected, with the planned manner of administration in mind, so as to provide for the desired bulk, consistency, etc., when combined with a nucleic acid and the other components of a given pharmaceutical composition. Typical pharmaceutical carriers include, but are not limited to, binding agents (e.g., pregelatinized maize starch, polyvinylpyrrolidone or hydroxypropyl methylcellulose, etc.); fillers (e.g., lactose and other sugars, microcrystalline cellulose, pectin, gelatin, calcium sulfate, ethyl cellulose, polyacrylates or calcium hydrogen phosphate, etc.); lubricants (e.g., magnesium stearate, talc, silica, colloidal silicon dioxide, stearic acid, metallic stearates, hydrogenated vegetable oils, corn starch, polyethylene glycols, sodium benzoate, sodium acetate, etc.); disintegrants (e.g., starch, sodium starch glycolate, etc.); and wetting agents (e.g., sodium lauryl sulphate, etc).

[0787] Pharmaceutically acceptable organic or inorganic excipients suitable for non-parenteral administration which do not deleteriously react with nucleic acids can also be used to formulate the compositions of the present invention. Suitable pharmaceutically acceptable carriers include, but are not limited to, water, salt solutions, alcohols, polyethylene glycols, gelatin, lactose, amylose, magnesium stearate, talc, silicic acid, viscous paraffin, hydroxymethylcellulose, polyvinylpyrrolidone and the like.

[0788] Formulations for topical administration of nucleic acids can include sterile and non-sterile aqueous solutions, non-aqueous solutions in common solvents such as alcohols, or solutions of the nucleic acids in liquid or solid oil bases. The solutions can also contain buffers, diluents and other suitable additives. Pharmaceutically acceptable organic or inorganic excipients suitable for non-parenteral administration which do not deleteriously react with nucleic acids can be used.

[0789] Suitable pharmaceutically acceptable excipients include, but are not limited to, water, salt solutions, alcohol, polyethylene glycols, gelatin, lactose, amylose, magnesium stearate, talc, silicic acid, viscous paraffin, hydroxymethylcellulose, polyvinylpyrrolidone and the like.

[0790] vii. Other Components

[0791] The compositions of the present invention can additionally contain other adjunct components conventionally found in pharmaceutical compositions, at their art-established usage levels. Thus, for example, the compositions can contain additional, compatible, pharmaceutically-active materials such as, for example, antipruritics, astringents, local anesthetics or anti-inflammatory agents, or can contain additional materials useful in physically formulating various dosage forms of the compositions of the present invention, such as dyes, flavoring agents, preservatives, antioxidants, opacifiers, thickening agents and stabilizers. However, such materials, when added, should not unduly interfere with the biological activities of the components of the compositions of the present invention. The formulations can be sterilized and, if desired, mixed with auxiliary agents, e.g., lubricants, preservatives, stabilizers, wetting agents, emulsifiers, salts for influencing osmotic pressure, buffers, colorings, flavorings and/or aromatic substances and the like which do not deleteriously interact with the nucleic acid(s) of the formulation.

[0792] Aqueous suspensions can contain substances which increase the viscosity of the suspension including, for example, sodium carboxymethylcellulose, sorbitol and/or dextran. The suspension can also contain stabilizers.

[0793] In some embodiments, pharmaceutical compositions featured in the invention include (a) one or more iRNA compounds and (b) one or more agents which function by a non-RNAi mechanism and which are useful in treating an oxalate pathway-associated disease, disorder, or condition. Examples of such agents include, but are not lmited to pyridoxine, an ACE inhibitor (angiotensin converting enzyme inhibitors), e.g., benazepril (Lotensin); an angiotensin II receptor antagonist (ARB) (e.g., losartan potassium, such as Merck & Co.'s Cozaar®), e.g., Candesartan (Atacand); an HMG-CoA reductase inhibitor (e.g., a statin); dietary oxalate degrading compounds, e.g., Oxalate decarboxylase (Oxazyme); calcium binding agents, e.g., Sodium cellulose phosphate (Calcibind); diuretics, e.g., thiazide diuretics, such as hydrochlorothiazide (Microzide); phosphate binders, e.g., Sevelamer (Renagel); magnesium and Vitamin B6 supplements; potassium citrate; orthophosphates, bisphosphonates; oral phosphate and citrate solutions; high fluid intake, urinary tract endoscopy; extracorporeal shock wave lithotripsy; kidney dialysis; kidney stone removal (e.g., surgery); and kidney/liver transplant; or a combination of any of the foregoing.

[0794] Toxicity and therapeutic efficacy of such compounds can be determined by standard pharmaceutical procedures in cell cultures or experimental animals, e.g., for determining the LD₅₀ (the dose lethal to 50% of the population) and the ED₅₀ (the dose therapeutically effective in 50% of the population). The dose ratio between toxic and therapeutic effects is the therapeutic index and it can be expressed as the ratio LD₅₀/ED₅₀. Compounds that exhibit high therapeutic indices are preferred.

[0795] The data obtained from cell culture assays and animal studies can be used in formulating a range of dosage for use in humans. The dosage of compositions featured herein in the invention lies generally within a range of circulating concentrations that include the ED₅₀ with little or no toxicity. The dosage can vary within this range depending upon the dosage form employed and the route of administration utilized. For any compound used in the methods featured in the invention, the therapeutically effective dose can be estimated initially from cell culture assays. A dose can be formulated in animal models to achieve a circulating plasma concentration range of the compound or, when appropriate, of the polypeptide product of a target sequence (e.g., achieving a decreased concentration of the polypeptide) that includes the IC₅₀ (i.e., the concentration of the test compound which achieves a half-maximal inhibition of symptoms) as determined in cell culture. Such information can be used to more accurately determine useful doses in humans. Levels in plasma can be measured, for example, by high performance liquid chromatography.

[0796] In addition to their administration, as discussed above, the iRNAs featured in the invention can be administered in combination with other known agents effective in treatment of pathological processes mediated by LDHA or LDHA and HAO1 expression. In any event, the administering physician can adjust the amount and timing of iRNA administration on the basis of results observed using standard measures of efficacy known in the art or described herein.

### VI. Methods of the Invention

[0797] The present invention also provides methods of using an iRNA of the invention and/or a composition of the invention to reduce and/or inhibit LDHA or LDHA and HAO1 expression in a cell, such as a cell in a subject. The methods include contacting the cell with a RNAi agent (or pharmaceutical composition comprising an iRNA agent) or pharmaceutical composition of the invention. In some embodiments, the cell is maintained for a time sufficient to obtain degradation of the mRNA transcript of an LDHA gene. In other embodiments, the cell is maintained for a time sufficient to obtain degradation of the mRNA transcript of an LDHA gene and an HAO1 gene in the cell.

[0798] It should be noted that, although the compositions of the invention target LDHA, an enzyme involved in numerous cellular processes (see, e.g., FIGS. 1A and 1B), as demonstrated in the Examples below, contacting a cell with a composition of the invention, or administering a composition of the invention to a subject, does not result in adverse effects in either wild-type or diseased subjects, thereby demonstrating the safety of the compostions of the invention.

[0799] Reduction in gene expression can be assessed by any methods known in the art. For example, a reduction in the expression of LDHA, and/or HAO1, and/or glycolate may be determined by determining the mRNA expression level of LDHA, and/or HAO1, and/or glycolate using methods routine to one of ordinary skill in the art, e.g., Northern blotting, qRT-PCR; by determining the protein level of LDHA, and/or HAO1, and/or glycolate using methods routine to one of ordinary skill in the art, such as Western blotting, immunological techniques. A reduction in the expression of LDHA, and/or HAO1, and/or glycolate may also be assessed indirectly by measuring a decrease in biological activity of LDHA, and/or HAO1, and/or glycolate, e.g., a decrease in the enzymatic activity of LDHA and/or a decrease in tissue or plasma oxalate, or urinary oxalate and/or glycolate excretion.

[0800] In the methods of the invention the cell may be contacted in vitro or in vivo, i.e., the cell may be within a subject.

[0801] A cell suitable for treatment using the methods of the invention may be any cell that expresses an LDHA gene, a cell that expresses an HAO1 gene, a cell that expresses a glycolate gene, a cell that expresses, an LDHA gene and a glycolate gene, a cell that expresses an HAO1 gene and a glycolate gene, a cell that expresses an LDHA gene and an HAO1 gene, or a cell that expresses an LDHA gene, an HAO1 gene, and a glycolate gene. A cell suitable for use in the methods of the invention may be a mammalian cell, e.g., a primate cell (such as a human cell or a non-human primate cell, e.g., a monkey cell or a chimpanzee cell), a non-primate cell (such as a cow cell, a pig cell, a camel cell, a llama cell, a horse cell, a goat cell, a rabbit cell, a sheep cell, a hamster, a guinea pig cell, a cat cell, a dog cell, a rat cell, a mouse cell, a lion cell, a tiger cell, a bear cell, or a buffalo cell), a bird cell (e.g., a duck cell or a goose cell), or a whale cell. In one embodiment, the cell is a human cell, e.g., a human liver cell.

[0802] LDHA expression is inhibited in the cell by at least about 5, 6, 7, 8, 9, 10, 11, 12, 13, 14, 15, 16, 17, 18, 19, 20, 21, 22, 23, 24, 25, 26, 27, 28, 29, 30, 31, 32, 33, 34, 35, 36, 37, 38, 39, 40, 41, 42, 43, 45, 46, 47, 48, 49, 50, 51, 52, 53, 54, 55, 56, 57, 58, 59, 60, 61, 62, 63, 64, 65, 66, 67, 68, 69, 70, 71, 72, 73, 74, 75, 76, 77, 78, 79, 80, 81, 82, 83, 84, 85, 86, 87, 88, 89, 90, 91, 92, 93, 94, 95, 96, 97, 98, 99, or about 100%. In preferred embodiments, LDHA expression is inhibited by at least 20%.

[0803] HAO1 expression may be inhibited in the cell by at least about 5, 6, 7, 8, 9, 10, 11, 12, 13, 14, 15, 16, 17, 18, 19, 20, 21, 22, 23, 24, 25, 26, 27, 28, 29, 30, 31, 32, 33, 34, 35, 36, 37, 38, 39, 40, 41, 42, 43, 45, 46, 47, 48, 49, 50, 51, 52, 53, 54, 55, 56, 57, 58, 59, 60, 61, 62, 63, 64, 65, 66, 67, 68, 69, 70, 71, 72, 73, 74, 75, 76, 77, 78, 79, 80, 81, 82, 83, 84, 85, 86, 87, 88, 89, 90, 91, 92, 93, 94, 95, 96, 97, 98, 99, or about 100%. In preferred embodiments, HAO1 expression is inhibited by at least 20%.

[0804] In embodiments in which a cell is contacted with a dual targeting RNAi agent of the invention, the level of inhibition of LDHA may be the same or different than the level of HAO1.

[0805] In one embodiment, the in vivo methods of the invention may include administering to a subject a composition containing an iRNA, where the iRNA includes a nucleotide sequence that is complementary to at least a part of an RNA transcript of the LDHA gene of the mammal to be treated. In another embodiment, the in vivo methods of the invention may include administering to a subject a composition containing an iRNA, where the iRNA includes a nucleotide sequence that is complementary to at least a part of an RNA transcript of the LDHA gene and a nucleotide sequence that is complementary to at least a part of an RNA transcript of the HAO1 gene of the mammal to be treated.

[0806] When the organism to be treated is a mammal such as a human, the composition can be administered by any means known in the art including, but not limited to oral, intraperitoneal, or parenteral routes, including intracranial (e.g., intraventricular, intraparenchymal and intrathecal), intravenous, intramuscular, subcutaneous, transdermal, airway (aerosol), nasal, rectal, and topical (including buccal and sublingual) administration. In certain embodiments, the compositions are administered by intravenous infusion or injection. In certain embodiments, the compositions are administered by subcutaneous injection.

[0807] In some embodiments, the administration is via a depot injection. A depot injection may release the iRNA in a consistent way over a prolonged time period. Thus, a depot injection may reduce the frequency of dosing needed to obtain a desired effect, e.g., a desired inhibition of LDHA, or a desired inhibition of both LDHA and HAO1, or a therapeutic or prophylactic effect. A depot injection may also provide more consistent serum concentrations. Depot injections may include subcutaneous injections or intramuscular injections. In preferred embodiments, the depot injection is a subcutaneous injection.

[0808] In some embodiments, the administration is via a pump. The pump may be an external pump or a surgically implanted pump. In certain embodiments, the pump is a subcutaneously implanted osmotic pump. In other embodiments, the pump is an infusion pump. An infusion pump may be used for intravenous, subcutaneous, arterial, or epidural infusions. In preferred embodiments, the infusion pump is a subcutaneous infusion pump. In other embodiments, the pump is a surgically implanted pump that delivers the iRNA to the liver.

[0809] An iRNA of the invention may be present in a pharmaceutical composition, such as in a suitable buffer solution. The buffer solution may comprise acetate, citrate, prolamine, carbonate, or phosphate, or any combination thereof. In one embodiment, the buffer solution is phosphate buffered saline (PBS). The pH and osmolarity of the buffer solution containing the iRNA can be adjusted such that it is suitable for administering to a subject.

[0810] Alternatively, an iRNA of the invention may be administered as a pharmaceutical composition, such as a dsRNA liposomal formulation.

[0811] The mode of administration may be chosen based upon whether local or systemic treatment is desired and based upon the area to be treated. The route and site of administration may be chosen to enhance targeting.

[0812] In one aspect, the present invention also provides methods for inhibiting the expression of an LDHA gene in a mammal. The methods include administering to the mammal a composition comprising a dsRNA that targets an LDHA gene in a cell of the mammal, thereby inhibiting expression of the LDHA gene in the cell.

[0813] In another aspect, the present invention also provides methods for inhibiting the expression of an LDHA gene and an HAO1 gene in a mammal. The methods include administering to the mammal a pharmaceutical composition comprising a dsRNA agent that targets an LDHA gene and a dsRNA agent that targets an HAO1 gene in a cell of the mammal, thereby inhibiting expression of the LDHA gene and the HAO1 gene in the mammal. In one aspect, the present invention provides methods for inhibiting the expression of an LDHA gene and an HAO1 gene in a mammal. The methods include administering to the mammal a dual targeting RNAi agent (or pharmaceutical composition comprising a dual targeting agent) that targets an LDHA gene and an HAO1 gene in a cell of the mammal, thereby inhibiting expression of the LDHA gene and the HAO1 gene in the subject.

[0814] Reduction in gene expression can be assessed by any methods known it the art and by methods, e.g. qRT-PCR, described herein. Reduction in protein production can be assessed by any methods known it the art and by methods, e.g. ELISA, enzymatic activity, described herein.

[0815] The present invention also provides therapeutic and prophylactic methods which include administering to a subject having, or prone to developing an oxalate-associate disease, disorder, or condition, the iRNA agents, pharmaceutical compositions comprising an iRNA agent, or vectors comprising an iRNA of the invention.

[0816] In one aspect, the present invention provides methods of treating a subject having a disorder that would benefit from reduction in LDHA expression, e.g., an oxalate pathway-associated disease, disorder, or condition.

[0817] The treatment methods (and uses) of the invention include administering to the subject, e.g., a human, a therapeutically effective amount of a dsRNA agent, a dual targeting iRNA agent or a pharmaceutical composition comprising a dsRNA, a pharmaceutical compositions comprising a dual targeting RNAi agent or pharmaceutical composition of the invention comprising a first dsRNA agent that inhibits expression of LDHA and a second dsRNA agent that inhibits expression of HAO1, thereby treating the subject.

[0818] In one aspect, the invention provides methods of preventing at least one symptom in a subject having a disorder that would benefit from reduction in LDHA expression, e.g., an oxalate pathway-associated disease, disorder, or condition. The methods include administering to the subject a prophylactically effective amount of dsRNA agent, a dual targeting iRNA agent or a pharmaceutical composition comprising a dsRNA, a pharmaceutical compositions comprising a dual targeting RNAi agent or pharmaceutical composition of the invention comprising a first dsRNA agent that inhibits expression of LDHA and a second dsRNA agent that inhibits expression of HAO1, thereby preventing at least one symptom in the subject.

[0819] Subjects that would benefit from a reduction and/or inhibition of an LDHA gene expression include subjects that would benefit from reduction in both LDHA and HAO1 gene expression.

[0820] Therefore, in one embodiment, a subject that would benefit from reduction in the expression level of LDHA or a reduction in the expression of LDHA and HAO1, has normal urinary oxalate excretion levels, e.g., less than about 40 mg (440 μmol) in 24 hours (e.g., men have a normal urinary oxalate excretion level of less than about 43 mg/day and women have a normal urinary oxalate excretion level of less than about 32 mg/day). In another embodiment, a subject that would benefit from a reduction in the expression level of LDHA or a reduction in the expression of LDHA and HAO1 has mild hyperoxaluria (a urinary oxalate excretion level of about 40 to about 60 mg/day). In another embodiment, a subject that would benefit from reduction in the expression level of LDHA or a reduction in the expression of LDHA and HAO1 has high hyperoxaluria (a urinary oxalate excretion level of greater than about 60 mg/day).

[0821] In one embodiment, a subject that would benefit from reduction in LDHA expression or LDHA and HAO1 expression is a human at risk of developing an oxalate pathway-associated disease, disorder, or condition. In one embodiment, a subject that would benefit from reduction in LDHA expression or LDHA and HAO1 expression is a human having an oxalate pathway-associated disease, disorder, or condition. In yet another embodiment, a subject that would benefit from reduction in LDHA expression or LDHA and HAO1 expression is a human being treated for an oxalate pathway-associated disease, disorder, or condition.

[0822] In one embodiment, a subject having an oxalate pathway-associated disease, disorder, or condition has an oxalate-associated disease, disorder, or condition. Non-limiting examples of oxalate-associated disease, disorder, or condition include a kidney stone formation disease, disorder, or condition, or a calcium oxalate tissue deposition disease, disorder, or condition. The kidney stone formation disease, disorder, or condition may be a calcium oxalate stone formation disease, disorder, or condition or a non-calcium oxalate stone formation disease, disorder, or condition. The calcium oxalate stone formation disease, disorder, or condition may be a hyperoxaluria disease, disorder, or condition (e.g., mild hyperoxaluria (a urinary oxalate excretion level of about 40 to about 60 mg/day) or high hyperoxaluria (a urinary oxalate excretion level of greater than about 60 mg/day)); or a non-hyperoxaluria disease, disorder, or condition (i.e., a calcium oxalate stone formation disease without hyperoxaluria, e.g., normal urinary oxalate excretion levels, e.g., less than about 40 mg (440 μmol) in 24 hours (e.g., men have a normal urinary oxalate excretion level of less than about 43 mg/day and women have a normal urinary oxalate excretion level of less than about 32 mg/day).

[0823] In one embodiment, the hyperoxaluria disease, disorder, or condition is selected from the group consisting of primary hyperoxaluria, enteric hyperoxaluria, dietary hyperoxaluria, and idiopathic hyperoxaluria.

[0824] In one embodiment, the non-hyperoxaluria stone formation disease, disorder, or condition is hypercalciuria and/or hypocitraturia. In another embodiment, the non-hyperoxaluria stone formation disease, disorder, or condition is calcium oxalate or non-calcium oxalate kidney stone formation disease.

[0825] In one embodiment, the calcium oxalate stone formation disease, disorder, or condition is an inherited disorder, such as a Primary Hyperoxaluria (PH), e.g., Primary Hyperoxaluria Type 1 (PH1); Primary Hyperoxaluria Type 2 (PH2); Primary Hyperoxaluria Type 3 (PH3); or Primary Hyperoxaluria Non-Type 1, Non-Type 2, Non-Type 3 (PH-Non-Type 1, Non-Type 2, Non-Type 3). PH1 is a hereditary disorder casued by mutations in alanine glyoxylate aminotransferase (AGT), PH2 is due to mutations in glyoxylate reductase/hydroxypyruvate reductase (GRHPR), and PH3 is caused by mutations in HOGA1 (formerly DHDPSL). Subjects having PH-Non-Type 1, Non-Type 2, Non-Type 3 have clinical characteristics indistinguishable from type 1, 2, and 3, but with normal AGT, GRHPR, and HOGA1 liver enzyme activity, yet the etiology of the marked hyperoxaluria in such subjects remains to be elucidated.

[0826] A deficiency in either AGT or GRHPR activities results in an excess of glyoxylate and oxalate (see, e.g., Knight et al., (2011) Am J Physiol Renal Physiol 302(6): F688-F693). Therefore, inhibition of LDHA expression and/or activity will decrease the level of excess oxalate. In addition, the inhibition of glycolate oxidase (HAO1) will further reduce the level of glyoxylate. The buildup of oxalate in subjects having PH causes increased excretion of oxalate, which in turn results in renal and bladder stones. Stones cause urinary obstruction (often with severe and acute pain), secondary infection of urine and eventually kidney damage. Oxalate stones tend to be severe, resulting in relatively early kidney damage (e.g., onset in teenage years to early adulthood), which impairs the excretion of oxalate, leading to a further acceleration in accumulation of oxalate in the body. After the development of renal failure, patients may get deposits of oxalate in the bones, joints and bone marrow. Severe cases may develop haematological problems such as anaemia and thrombocytopaenia. The deposition of oxalate in the body is sometimes called “oxalosis” to be distinguished from “oxaluria” which refers to oxalate in the urine. Renal failure is a serious complication requiring treatment in its own right. Dialysis can control renal failure but tends to be inadequate to dispose of excess oxalate. Renal transplant is more effective and this is the primary treatment of severe hyperoxaluria. Liver transplantation (often in addition to renal transplant) may be able to control the disease by correcting the metabolic defect. In a proportion of patients with primary hyperoxaluria type 1, pyridoxine treatment (vitamin B6) may also decrease oxalate excretion and prevent kidney stone formation.

[0827] As exemplified in Example 3, the level of endogenous oxalate excreted in the urine of an art recognized animal model of PH1, e.g., an Agxt deficient mouse, was reduced following administration of an LDHA-specific siRNA (see, e.g., FIG. 6). Accordingly, in one aspect, the present invention provides methods for treating a subject having PHE The methods include administering to the subject a therapeutically effective amount of a dsRNA targeting an LDHA gene and/or an HAO1 gene, a pharmaceutical composition comprising a dsRNA agent that targets an LDHA gene and/or a dsRNA agent that targets an HAO1 gene.

[0828] As also exemplified in Example 3, the level of endogenous oxalate excreted in the urine of an art recognized animal model of PH2, e.g., a Grhpr deficient mouse, was reduced following administration of an LDHA-specific siRNA (see, e.g., FIG. 6). Accordingly, in one aspect, the present invention provides methods for treating a subject having PH2. The methods include administering to the subject a therapeutically effective amount of a dsRNA targeting an LDHA gene and/or an HAO1 gene, a pharmaceutical composition comprising a dsRNA agent that targets an LDHA gene and/or a dsRNA agent that targets an HAO1 gene in a cell of the subject.

[0829] In some embodiment, the methods for treating a subject having PH2 further include altering the diet of the subject (e.g., decreasing protein intake, decreasing sodium intake, decreasing ascorbic acid intake, moderatating calcium intake, supplementing phosphate, supplementing magnesium, or pyridoxine treatment; or a combination of any of the foregoing) and/or transplanting a kidney in the subject

[0830] In another embodiment, the calcium oxalate stone formation disease, disorder, or condition is enteric hyperoxaluria. Enteric hyperoxaluria is the formation of calcium oxalate calculi in the urinary tract due to excessive absorption of oxalate from the colon, occurring as a result of intestinal bacterial overgrowth syndromes, fat malabsorption, chronic biliary or pancreatic disease, various intestinal surgical procedures, gastric bypass surgery, inflammatory bowel disease, or any medical condition that causes chronic diarrhea, e.g., Crohn's disease or ulcerative colitis).

[0831] In another embodiment, the calcium oxalate stone formation disease, disorder, or condition is dietary hyperoxaluria, e.g., hyperoxaluria as a result of too much oxalate in the diet, e.g., from too much spinach, rhubarb, almonds, bulgur, millet, corn grits, soy flour, cornmeal, navy beans, etc.

[0832] In another embodiment, the calcium oxalate stone formation disease, disorder, or condition is idiopathic hyperoxaluria. Subjects having idiopathic hyperoxaluria have above normal levels of urinary oxalate of unknown cause, but still develop stones. Subjects at risk of developing idiopathic hyperoxaluria include diabetics and obese subjects. For example, epidemiological data has demonstrated that as body mass index (BMI) increases, urinary oxalate excretion increases and subjects having diabetes have increases urinary oxalate levels.

[0833] In one embodiment, the non-calcium oxalate stone formation disease, disorder, or condition is hypercalciuria (hypercalcinuria). Hypercalciuria is a condition of elevated calcium in the urine. Chronic hypercalcinuria may lead to impairment of renal function, nephrocalcinosis, and renal insufficiency. Subjects at risk of developing hypercalciuria include subjects having Dent's disease, absorptive hypercalciuria, and primary hyperparathyroid.

[0834] In another embodiment, the non-calcium oxalate stone formation disease, disorder, or condition is hypocitraturia. In one embodiment, the hypocitraturia is severe hypocitraturia, e.g., citrate excretion of less than 100 mg per day. In another embodiment, the hypocitraturia is mild to moderate hypocitraturi, e.g., citrate excretion of 100-320 mg per day.

[0835] In one embodiment, a non-calcium oxalate stone formation disease, disorder, or condition is a disease, disorder, or condition, such as a ureterolithiasis or a nephrocalcinosis, of calcium stones; struvite (magnesium ammonium phosphate) stones; uric acid stones; or cystine stones. Although the primary component of the stones in such diseases, disorders, and conditions is other than oxalate, oxalate may still be present and form a nidus for further growth of the stones. Accordingly, subjects having a disease, disorder, or condition of calcium stones, struvite (magnesium ammonium phosphate) stones, uric acid stones, or cystine stones would benefit from the methods of the invention.

[0836] In one embodiment, an oxalate-associated disease, disorder, or condition is a calcium oxalate tissue deposition disease, disorder, or condition. For example, when glomerular filtration rate (GFR) drops below about 30-40 mL/min per 1.73 m², renal capacity to excrete calcium oxalate is significantly impaired. At this stage, calcium oxalate starts to deposit in extrarenal tissues. Calcium oxalate deposits may occur in the thyroid, breasts, kidneys, bones, and bone marrow, myocardium, cardiac conduction system. This leads to cardiomyopathy, heart block and other cardiac conduction defects, vascular disease, retinopathy, synovitis, oxalate osteopathy and anemia that is noted to be resistant to treatment. The deposition of calcium oxalate mat be systemic or tissue specific. For example, subjects having arthritis, sarcoidosis, end-stage renal disease are at risk of developing systemic calcium oxalate tissue deposition disease, disorder, or condition. Subjects at risk of developing tissue specific depositions in the kidney, for example, include subjects having medullary sponge kidney, nephrocalcinosis, renal tubular acidosis (RTA), and transplant recipients, e.g., kidney transplant receipients.

[0837] In one embodiment, an oxalate pathway-associated disease, disorder, or condition is a lactate dehydrogenase-associated disease, disorder, or condition. Non-limiting examples of lactate dehydrogenase-associated diseases, disorders, or conditions include cancer, e.g., cancer, e.g., hepatocellular carcinoma, fatty liver (steatosis), nonalcoholic steatohepatitis (NASH), cirrhosis of the liver, accumulation of fat in the liver, inflammation of the liver, hepatocellular necrosis, liver fibrosis, and nonalcoholic fatty liver disease (NAFLD).

[0838] A diagnosis of nonalcoholic fatty liver disease (NAFLD) requires that (a) there is evidence of hepatic steatosis, either by imaging or by histology and (b) there are no causes for secondary hepatic fat accumulation such as significant alcohol consumption, use of steatogenic medication or hereditary disorders. In the majority of patients, NAFLD is associated with metabolic risk factors such as obesity, diabetes mellitus, and dyslipidemia. NAFLD is histologically further categorized into nonalcoholic fatty liver (NAFL) and nonalcoholic steatohepatitis (NASH). NAFL is defined as the presence of hepatic steatosis with no evidence of hepatocellular injury in the form of ballooning of the hepatocytes. NASH is defined as the presence of hepatic steatosis and inflammation with hepatocyte injury (ballooning) with or without fibrosis (Chalasani et al., Hepatol. 55:2005-2023, 2012). It is generally agreed that patients with simple steatosis have very slow, if any, histological progression, while patients with NASH can exhibit histological progression to cirrhotic-stage disease. The long term outcomes of patients with NAFLD and NASH have been reported in several studies.

[0839] LHDA is required for the initiation, maintenance and progression of tumors (Shi and Pinto, PLOS ONE 2014, 9(1), e86365; Le et al. Proc Natl Acad Sci USA 107: 2037-2042) and up-regulation of LDHA is a characteristic of many cancer types (Goldman R D et al., Cancer Res 24: 389-399.; Koukourakis M I, et al, Br J Cancer 89: 877-885.; Koukourakis M I, et al, L J Clin Oncol 24: 4301-4308.; Kolev Y, et al, Ann Surg Oncol 15: 2336-2344; Zhuang L, et al, Mod Pathol 23: 45-53), including, e.g., breast cancer, lymphoma, renal cancer (including renal cell cancer tumors), hereditary leiomyomatosis, pancreatic cancer, liver cancer (including hepatocellular carcinoma), and other forms of cancer.

[0840] In another aspect, the present invention provides uses of a therapeutically effective amount of a dsRNA agent, a dual targeting iRNA agent or a pharmaceutical composition comprising a dsRNA, a pharmaceutical compositions comprising a dual targeting RNAi agent or pharmaceutical composition of the invention comprising a first dsRNA agent that inhibits expression of LDHA and a second dsRNA agent that inhibits expression of HAO1 for treating a subject, e.g., a subject that would benefit from a reduction and/or inhibition of LDHA expression or LDHA and HAO1 expression, e.g., an oxalate pathway-associated disease, disorder, or condition.

[0841] In a further aspect, the present invention provides uses of a dual targeting iRNA agent or a pharmaceutical composition comprising of a dsRNA agent, a dual targeting iRNA agent or a pharmaceutical composition comprising a dsRNA, a pharmaceutical composition comprising a dual targeting RNAi agent or pharmaceutical composition of the invention comprising a first dsRNA agent that inhibits expression of LDHA and a second dsRNA agent that inhibits expression of HAO1 in the manufacture of a medicament for treating a subject, e.g., a subject that would benefit from a reduction and/or inhibition of LDHA expression or LDHA and HAO1 expression, e.g., an oxalate pathway-associated disease, disorder, or condition.

[0842] In the methods (and uses) of the invention which comprise administering to a subject a first dsRNA agent targeting LDHA and a second dsRNA agent targeting HAO1, the first and second dsRNA agents may be formulated in the same composition or different compositions and may administered to the subject in the same composition or in separate compositions.

[0843] The dsRNA agent may be administered to the subject at a dose of about 0.1 mg/kg to about 50 mg/kg. Typically, a suitable dose will be in the range of about 0.1 mg/kg to about 5.0 mg/kg, preferably about 0.3 mg/kg and about 3.0 mg/kg. In addition, the. The dual targeting RNAi agent may be administered to the subject at a dose of about 0.1 mg/kg to about 50 mg/kg. Typically, a suitable dose will be in the range of about 0.1 mg/kg to about 5.0 mg/kg, preferably about 0.3 mg/kg and about 3.0 mg/kg. In addition, the first dsRNA agent and the second dsRNA agent may be each independently administered to the subject at a dose of about 0.5 mg/kg to about 50 mg/kg, e.g., in the range of about 0.1 mg/kg to about 5.0 mg/kg, preferably about 0.3 mg/kg and about 3.0 mg/kg.

[0844] In the methods (and uses) of the invention which comprise administering to a subject a first dsRNA agent targeting LDHA and a second dsRNA agent targeting HAO1, the first and second dsRNA agents may be administered to a subject at the same dose or different doses.

[0845] The iRNA can be administered by intravenous infusion over a period of time, on a regular basis. In certain embodiments, after an initial treatment regimen, the treatments can be administered on a less frequent basis.

[0846] Administration of the iRNA can reduce LDHA levels, e.g., in a cell, tissue, blood, urine or other compartment of the patient by at least about 5%, 6, 7, 8, 9, 10, 11, 12, 13, 14, 15, 16, 17, 18, 19, 20, 21, 22, 23, 24, 25, 26, 27, 28, 29, 30, 31, 32, 33, 34, 35, 36, 37, 38, 39, 40, 41, 42, 43, 44, 45, 46, 47, 48, 39, 50, 51, 52, 53, 54, 55, 56, 57, 58, 59, 60, 61, 62, 63, 64, 65, 66, 67, 68, 69, 70, 71, 72, 73, 74, 75, 76, 77, 78, 79, 80, 81, 82, 83, 84, 85, 86, 87, 88, 89, 90, 91, 92, 93, 94, 95, 96, 97, 98, or at least about 99% or more. In a preferred embodiment, administration of the iRNA can reduce LDHA levels, e.g., in a cell, tissue, blood, urine or other compartment of the patient by at least 20%.

[0847] Administration of the iRNA can reduce HAO1 levels, e.g., in a cell, tissue, blood, urine or other compartment of the patient by at least about 5%, 6, 7, 8, 9, 10, 11, 12, 13, 14, 15, 16, 17, 18, 19, 20, 21, 22, 23, 24, 25, 26, 27, 28, 29, 30, 31, 32, 33, 34, 35, 36, 37, 38, 39, 40, 41, 42, 43, 44, 45, 46, 47, 48, 39, 50, 51, 52, 53, 54, 55, 56, 57, 58, 59, 60, 61, 62, 63, 64, 65, 66, 67, 68, 69, 70, 71, 72, 73, 74, 75, 76, 77, 78, 79, 80, 81, 82, 83, 84, 85, 86, 87, 88, 89, 90, 91, 92, 93, 94, 95, 96, 97, 98, or at least about 99% or more. In a preferred embodiment, administration of the iRNA can reduce HAO1 levels, e.g., in a cell, tissue, blood, urine or other compartment of the patient by at least 20%.

[0848] In the methods (and uses) of the invention which comprise administering to a subject a first dsRNA agent targeting LDHA and a second dsRNA agent targeting HAO1, the level of inhibition of LDHA may be the same or different that the level of inhibition of HAO1.

[0849] In the methods (and uses) of the invention which comprise administering to a subject a dual targeting RNAi agent, the dual targeting RNAi agent may inhibit expression of the LDHA gene and the HAO1 gene to a level substantially the same as the level of inhibition of expression obtained by the contacting of a cell with both dsRNA agents individually, or the dual targeting RNAi agent may inhibit expression of the LDHA gene and the HAO1 gene to a level higher than the level of inhibition of expression obtained by the contacting of a cell with both dsRNA agents individually.

[0850] Before administration of a full dose of the iRNA, patients can be administered a smaller dose, such as a 5% infusion reaction, and monitored for adverse effects, such as an allergic reaction. In another example, the patient can be monitored for unwanted immunostimulatory effects, such as increased cytokine (e.g., TNF-alpha or INF-alpha) levels.

[0851] Alternatively, the iRNA can be administered subcutaneously, i.e., by subcutaneous injection. One or more injections may be used to deliver the desired daily dose of iRNA to a subject. The injections may be repeated over a period of time. The administration may be repeated on a regular basis. In certain embodiments, after an initial treatment regimen, the treatments can be administered on a less frequent basis. A repeat-dose regimine may include administration of a therapeutic amount of iRNA on a regular basis, such as every other day or to once a year. In certain embodiments, the iRNA is administered about once per month to about once per quarter (i.e., about once every three months).

[0852] In one embodiment, the method includes administering a composition featured herein such that expression of the target LDHA gene and/or the target HAO1 gene is decreased, such as for about 1, 2, 3, 4, 5, 6, 7, 8, 12, 16, 18, 24 hours, 28, 32, or abour 36 hours. In one embodiment, expression of the target LDHA gene and the HAO1 gene is decreased for an extended duration, e.g., at least about two, three, four days or more, e.g., about one week, two weeks, three weeks, or four weeks or longer.

[0853] Preferably, the iRNAs useful for the methods and compositions featured herein specifically target RNAs (primary or processed) of the target LDHA and HAO1 genes. Compositions and methods for inhibiting the expression of these genes using iRNAs can be prepared and performed as described herein.

[0854] Administration of the dsRNA according to the methods of the invention may result in a reduction of the severity, signs, symptoms, and/or markers of such diseases or disorders in a patient with a disorder of lipid metabolism. By “reduction” in this context is meant a statistically significant decrease in such level. The reduction can be, for example, at least about 5%, 10%, 15%, 20%, 25%, 30%, 35%, 40%, 45%, 50%, 55%, 60%, 65%, 70%, 75%, 80%, 85%, 90%, 95%, or about 100%.

[0855] Efficacy of treatment or prevention of disease can be assessed, for example by measuring disease progression, disease remission, symptom severity, reduction in pain, quality of life, dose of a medication required to sustain a treatment effect, level of a disease marker or any other measurable parameter appropriate for a given disease being treated or targeted for prevention. It is well within the ability of one skilled in the art to monitor efficacy of treatment or prevention by measuring any one of such parameters, or any combination of parameters. For example, efficacy of treatment of a disorder of lipid metabolism may be assessed, for example, by periodic monitoring of one or more serum lipid levels, e.g., triglyceride levels. Comparisons of the later readings with the initial readings provide a physician an indication of whether the treatment is effective. It is well within the ability of one skilled in the art to monitor efficacy of treatment or prevention by measuring any one of such parameters, or any combination of parameters. In connection with the administration of an iRNA or pharmaceutical composition thereof, “effective against” a disorder of lipid metabolism indicates that administration in a clinically appropriate manner results in a beneficial effect for at least a statistically significant fraction of patients, such as a improvement of symptoms, a cure, a reduction in disease, extension of life, improvement in quality of life, or other effect generally recognized as positive by medical doctors familiar with treating disorder of lipid metabolisms and the related causes.

[0856] A treatment or preventive effect is evident when there is a statistically significant improvement in one or more parameters of disease status, or by a failure to worsen or to develop symptoms where they would otherwise be anticipated. As an example, a favorable change of at least 10% in a measurable parameter of disease, and preferably at least 20%, 30%, 40%, 50% or more can be indicative of effective treatment. Efficacy for a given iRNA drug or formulation of that drug can also be judged using an experimental animal model for the given disease as known in the art.

[0857] The invention further provides methods for the use of a iRNA agent or a pharmaceutical composition of the invention, e.g., for treating a subject that would benefit from reduction and/or inhibition of LDHA expression or LDHA and HAOlexpression, e.g., a subject having an oxalate pathway-associated disease, disorder, or condition, in combination with other pharmaceuticals and/or other therapeutic methods, e.g., with known pharmaceuticals and/or known therapeutic methods, such as, for example, those which are currently employed for treating these disorders. For example, in certain embodiments, an iRNA agent or pharmaceutical composition of the invention is administered in combination with, e.g., pyridoxine, an ACE inhibitor (angiotensin converting enzyme inhibitors), e.g., benazepril (Lotensin); an angiotensin II receptor antagonist (ARB) (e.g., losartan potassium, such as Merck & Co.'s Cozaar®), e.g., Candesartan (Atacand); an HMG-CoA reductase inhibitor (e.g., a statin); dietary oxalate degrading compounds, e.g., Oxalate decarboxylase (Oxazyme); calcium binding agents, e.g., Sodium cellulose phosphate (Calcibind); diuretics, e.g., thiazide diuretics, such as hydrochlorothiazide (Microzide); phosphate binders, e.g., Sevelamer (Renagel); magnesium and Vitamin B6 supplements; potassium citrate; orthophosphates, bisphosphonates; oral phosphate and citrate solutions; high fluid intake, urinary tract endoscopy; extracorporeal shock wave lithotripsy; kidney dialysis; kidney stone removal (e.g., surgery); and kidney/liver transplant; or a combination of any of the foregoing.

[0858] In certain embodiments, an iRNA agent as described herein is administered in combination with an iRNA agent targeting hydroxyproline dehydrogenase (HYPDH; also known as HPDX or PRODH2) (see, e.g., Li, et al. (Biochem Biophys Acta (2016) 1862:233-239) or an inhibitory analog of HYPDH (see, e.g., Summitt, et al. (Biochem J (2015) 466:273-281).

[0859] The iRNA agent and an additional therapeutic agent and/or treatment may be administered at the same time and/or in the same combination, e.g., subcutaneously, or the additional therapeutic agent can be administered as part of a separate composition or at separate times and/or by another method known in the art or described herein.

### VII. Kits

[0860] The present invention also provides kits for performing any of the methods of the invention. Such kits include one or more RNAi agent(s) and instructions for use, e.g., instructions for inhibiting expression of a LDHA or LDHA and HAO1 in a cell by contacting the cell with an RNAi agent or pharmaceutical composition of the invention in an amount effective to inhibit expression of the LDHA or LDHA and HAO1. The kits may optionally further comprise means for contacting the cell with the RNAi agent (e.g., an injection device), or means for measuring the inhibition of LDHA and/or HAO1 (e.g., means for measuring the inhibition of LDHA and/or HAO1 mRNA and/or LDHA and/or HAO1 protein). Such means for measuring the inhibition of LDHA and/or HAO1 may comprise a means for obtaining a sample from a subject, such as, e.g., a plasma sample. The kits of the invention may optionally further comprise means for administering the RNAi agent(s) to a subject or means for determining the therapeutically effective or prophylactically effective amount.

[0861] Unless otherwise defined, all technical and scientific terms used herein have the same meaning as commonly understood by one of ordinary skill in the art to which this invention belongs. Although methods and materials similar or equivalent to those described herein can be used in the practice or testing of the iRNAs and methods featured in the invention, suitable methods and materials are described below. All publications, patent applications, patents, and other references mentioned herein are incorporated by reference in their entirety. In case of conflict, the present specification, including definitions, will control. In addition, the materials, methods, and examples are illustrative only and not intended to be limiting.

### EXAMPLES

### Example 1. iRNA Design, Synthesis, Selection, and In Vitro Evaluation

[0862] Source of Reagents

[0863] Where the source of a reagent is not specifically given herein, such reagent can be obtained from any supplier of reagents for molecular biology at a quality/purity standard for application in molecular biology.

[0864] Transcripts

[0865] A set of iRNAs targeting LDHA that cross-react with mouse and rat Ldha (human NCBI refseqID: NM_010699.2) were designed using custom R and Python scripts. The mouse Ldha, variant 1 REFSEQ mRNA has a length of 1,661 bases.

[0866] An additional set of iRNAs targeting LDHA (human: NCBI refseqID NM_005566.3; NCBI GeneID: 3939) as well as toxicology-species LDHA orthologs (cynomolgus monkey: NM_001283551.1) was designed using custom R and Python scripts. The human NM_005566 REFSEQ mRNA, version 3, has a length of 2226 bases.

[0867] A detailed list of the unmodified mouse/rat cross-reactive LDHA sense and antisense strand sequences is shown in Table 2. A detailed list of the modified mouse/rat cross-reactive LDHA sense and antisense strand sequences is shown in Table 3.

[0868] A detailed list of the unmodified human/Cynomolgus cross-reactive LDHA sense and antisense strand sequences is shown in Table 4. A detailed list of the modified human/Cynomolgus cross-reactive LDHA sense and antisense strand sequences is shown in Table 5.

[0869] As described in PCT Publication, WO 2016/057893 (the entire contents of thwich is incorporated herein by reference), a set of iRNAs targeting HAO1 were also designed. Design used the following transcripts from the NCBI RefSeq collection: human (Homo sapiens) HAO1 mRNA is NM_017545.2; cynomolgus monkey (Macaca fascicularis) HAO1 mRNA is XM_005568381.1; Mouse (Mus musculus) HAO1 mRNA is NM_010403.2; Rat (Rattus norvegicus) HAO1 mRNA is XM_006235096.1.

[0870] Tables 7 and 8 provide the modified sense and antisense strand sequences of duplexes targeting HAO1. Tables 9, 10, 11, 14, and 15 provide the unmodified sense and antisense strand sequences of duplexes targeting HAO1. Tables 12, 13, and 16 provide the unmodified and modified sense and antisense strand sequences of duplexes targeting HAO1.

[0871] When known, the species of HAO1 that is inhibited by the duplex is noted: Hs indicates that the agent inhibits the expression of human HAO1; Mm indicates that the agent inhibits the expression of mouse HAO1; and Hs/Mm indicates that the agent inhibits expression of both human and mouse HAO.

[0872] In Vitro Screening:

[0873] Cell culture and transfections Primary Mouse Hepatocyte cells (PMH) (MSCP10, Lot # MC613) were transfected by adding 4.9 μl of Opti-MEM plus 0.1 μl of Lipofectamine RNAiMax per well (Invitrogen, Carlsbad Calif. cat #13778-150) to 5 μl of siRNA duplexes per well into a 384-well plate and incubated at room temperature for 15 minutes. Forty μl of DMEM (Hep3b) of William's E Medium (PMH) containing about 5×10³ cells was then added to the siRNA mixture. Cells were incubated for 24 hours prior to RNA purification. Single dose experiments were performed at 10 nM and 0.1 nM final duplex concentration.

[0874] Hep3b cells (ATCC) were transfected by adding 4.9 μl of Opti-MEM plus 0.1 μl of Lipofectamine RNAiMax per well (Invitrogen, Carlsbad Calif. cat #13778-150) to 5 μl of siRNA duplexes per well into a 384-well plate and incubated at room temperature for 15 minutes. Forty ul of Eagle's Minimal Essential Medium (Life Tech) containing ˜5×10³ cells were then added to the siRNA mixture. Cells were incubated for 24 hours prior to RNA purification. Single dose experiments were performed at 10 nM.

[0875] Total RNA Isolation Using DYNABEADS mRNA Isolation Kit (Invitrogen, Part #: 610-12)

[0876] Cells were lysed in 75 μl of Lysis/Binding Buffer containing 3 μL of beads per well and mixed for 10 minutes on an electrostatic shaker. The washing steps were automated on a Biotek EL406, using a magnetic plate support. Beads were washed (90 μL) once in Buffer A, once in Buffer B, and twice in Buffer E, with aspiration steps in between. Following a final aspiration, complete 10 μL RT mixture was added to each well, as described below.

[0877] cDNA Synthesis Using ABI High Capacity cDNA Reverse Transcription Kit (Applied Biosystems, Foster City, Calif., Cat #4368813)

[0878] A master mix of 1 μl 10× Buffer, 0.4 μl 25×dNTPs, 1 μl Random primers, 0.5 μl Reverse Transcriptase, 0.5 μl RNase inhibitor and 6.6 μl of H₂O per reaction was added per well. Plates were sealed, agitated for 10 minutes on an electrostatic shaker, and then incubated at 37° C. for 2 hours. Following this, the plates were agitated at 80° C. for 8 minutes.

[0879] Real Time PCR

[0880] Two μ1 of cDNA was added to a master mix containing 0.5 μl of human GAPDH TaqMan Probe (4326317E), 0.5 μl human LDHA, 2 μl nuclease-free water and 50 μl Lightcycler 480 probe master mix (Roche Cat #04887301001) per well in a 384 well plates (Roche cat #04887301001). Real time PCR was performed in a LightCycler480 Real Time PCR system (Roche) using the ΔΔCt(RQ) assay. Each duplex was tested in at least two independent transfections, unless otherwise noted in the summary tables.

[0881] To calculate relative fold change, real time data was analyzed using the ΔΔCt method and normalized to assays performed with cells transfected with 10 nM nonspecific siRNA, or mock transfected cells.

[0882] Table 6A shows the results of a single dose screen in primary mouse hepatocytes transfected with the indicated GalNAC conjugated modified iRNAs. Data are expressed as percent of message remaining relative to untreated cells.

[0883] Table 6B shows the results of a single dose screen in primary mouse hepatocytes transfected with the indicated GalNAC conjugated modified iRNAs. Data are expressed as percent of message remaining relative to untreated cells.

TABLE 1
Abbreviations of nucleotide monomers used in
nucleic acid sequence representation.
It will be understood that these monomers, when present in an
oligonucleotide, are mutually linked by 5′-3′-phosphodiester bonds.

| Abbreviation | Nucleotide(s) |
|---|---|
| A | Adenosine-3′-phosphate |
| Ab | beta-L-adenosine-3′-phosphate |
| Abs | beta-L-adenosine-3′-phosphorothioate |
| Af | 2′-fluoroadenosine-3′-phosphate |
| Afs | 2′-fluoroadenosine-3′-phosphorothioate |
| As | adenosine-3′-phosphorothioate |
| C | cytidine-3′-phosphate |
| Cb | beta-L-cytidine-3′-phosphate |
| Cbs | beta-L-cytidine-3′-phosphorothioate |
| Cf | 2′-fluorocytidine-3′-phosphate |
| Cfs | 2′-fluorocytidine-3′-phosphorothioate |
| Cs | cytidine-3′-phosphorothioate |
| G | guanosine-3′-phosphate |
| Gb | beta-L-guanosine-3′-phosphate |
| Gbs | beta-L-guanosine-3′-phosphorothioate |
| Gf | 2′-fluoroguanosine-3′-phosphate |
| Gfs | 2′-fluoroguanosine-3′-phosphorothioate |
| Gs | guanosine-3′-phosphorothioate |
| T | 5′-methyluridine-3′-phosphate |
| Tf | 2′-fluoro-5-methyluridine-3′-phosphate |
| Tfs | 2′-fluoro-5-methyluridine-3′-phosphorothioate |
| Ts | 5-methyluridine-3′-phosphorothioate |
| U | Uridine-3′-phosphate |
| Uf | 2′-fluorouridine-3′-phosphate |
| Ufs | 2′-fluorouridine-3′-phosphorothioate |
| Us | uridine-3′-phosphorothioate |
| N | any nucleotide (G, A, C, T or U) |
| a | 2′-O-methyladenosine-3′-phosphate |
| as | 2′-O-methyladenosine-3′-phosphorothioate |
| c | 2′-O-methylcytidine-3′-phosphate |
| cs | 2′-O-methylcytidine-3′-phosphorothioate |
| g | 2′-O-methylguanosine-3′-phosphate |
| gs | 2′-O-methylguanosine-3′-phosphorothioate |
| t | 2′-O-methyl-5-methyluridine-3′-phosphate |
| ts | 2′-O-methyl-5-methyluridine-3′-phosphorothioate |
| u | 2′-O-methyluridine-3′-phosphate |
| us | 2′-O-methyluridine-3′-phosphorothioate |
| s | phosphorothioate linkage |
| L96 | N-[tris(GalNAc-alkyl)-amidodecanoyl)]-4-hydroxyprolinol |
| | Hyp-(GalNAc-alkyl)3 |
| Y34 | 2-hydroxymethyl-tetrahydrofurane-4-methoxy-3-phosphate |
| | (abasic 2′-OMe furanose) |
| Y44 | inverted abasic DNA (2-hydroxymethyl-tetrahydrofurane-5- |
| | phosphate) |
| (Agn) | Adenosine-glycol nucleic acid (GNA) |
| (Cgn) | Cytidine-glycol nucleic acid (GNA) |
| (Ggn) | Guanosine-glycol nucleic acid (GNA) |
| (Tgn) | Thymidine-glycol nucleic acid (GNA) S-Isomer |
| P | Phosphate |
| VP | Vinyl-phosphate |
| (Aam) | 2′-O-(N-methylacetamide)adenosine-3′-phosphate |
| (Aams) | 2′-O-(N-methylacetamide)adenosine-3′-phosphorothioate |
| (Gam) | 2′-O-(N-methylacetamide)guanosine-3′-phosphate |
| (Gams) | 2′-O-(N-methylacetamide)guanosine-3′-phosphorothioate |
| (Tam) | 2′-O-(N-methylacetamide)thymidine-3′-phosphate |
| (Tams) | 2′-O-(N-methylacetamide)thymidine-3′-phosphorothioate |
| dA | 2′-deoxyadenosine-3′-phosphate |
| dAs | 2′-deoxyadenosine-3′-phosphorothioate |
| dC | 2′-deoxycytidine-3′-phosphate |
| dCs | 2′-deoxycytidine-3′-phosphorothioate |
| dG | 2′-deoxyguanosine-3′-phosphate |
| dGs | 2′-deoxyguanosine-3′-phosphorothioate |
| dT | 2′-deoxythymidine-3′-phosphate |
| dTs | 2′-deoxythymidine-3′-phosphorothioate |
| dU | 2′-deoxyuridine |
| dUs | 2′-deoxyuridine-3′-phosphorothioate |
| (Aeo) | 2′-O-methoxyethyladenosine-3′-phosphate |
| (Aeos) | 2′-O-methoxyethyladenosine-3′-phosphorothioate |
| (Geo) | 2′-O-methoxyethylguanosine-3′-phosphate |
| (Geos) | 2′-O-methoxyethylguanosine-3′-phosphorothioate |
| (Teo) | 2′-O-methoxyethyl-5-methyluridine-3′-phosphate |
| (Teos) | 2′-O-methoxyethyl-5-methyluridine-3′-phosphorothioate |
| (m5Ceo) | 2′-O-methoxyethyl-5-methylcytidine-3′-phosphate |
| (m5Ceos) | 2′-O-methoxyethyl-5-methylcytidine-3′-phosphorothioate |
| (A3m) | 3′-O-methyladenosine-2′-phosphate |
| (A3mx) | 3′-O-methyl-xylofuranosyladenosine-2′-phosphate |
| (G3m) | 3′-O-methylguanosine-2′-phosphate |
| (G3mx) | 3′-O-methyl-xylofuranosylguanosine-2′-phosphate |
| (C3m) | 3′-O-methylcytidine-2′-phosphate |
| (C3mx) | 3′-O-methyl-xylofuranosylcytidine-2′-phosphate |
| (U3m) | 3′-O-methyluridine-2′-phosphate |
| U3mx) | 3′-O-methyl-xylofuranosyluridine-2′-phosphate |
| (m5Cam) | 2′-O-(N-methylacetamide)-5-methylcytidine-3′-phosphate |
| (m5Cams) | 2′-O-(N-methylacetamide)-5-methylcytidine-3′- |
| | phosphorothioate |
| (Chd) | 2′-O-hexadecyl-cytidine-3′-phosphate |
| (Chds) | 2′-O-hexadecyl-cytidine-3′-phosphorothioate |
| (Uhd) | 2′-O-hexadecyl-uridine-3′-phosphate |
| (Uhds) | 2′-O-hexadecyl-uridine-3′-phosphorothioate |
| (pshe) | Hydroxyethylphosphorothioate |

TABLE 2
UNMODIFIED MOUSE/RAT CROSS-REACTIVE LDHA iRNA SEQUENCES

| | Sense | | SEQ | | Antisense | | SEQ | |
|---|---|---|---|---|---|---|---|---|
| Duplex | Oligo | Sense | ID | Range in | Oligo | Antisense | ID | Range in |
| Name | Name | Sequence 5′ to 3′ | NO | NM_010699.2 | Name | Sequence 5′ to 3′ | NO | NM_010699.2 |
| AD- | A-169171 | AACACCAAAAAUUGUCUCCAA | 2990 | 357-377 | A-169172 | UUGGAGACAAUUUUUGGUGUUUU | 3034 | 355-377 |
| 84747 | | | | | | | | |
| AD- | A-169173 | AAACCGAGUAAUUGGAAGUGA | 2991 | 603-623 | A-169174 | UCACUUCCAAUUACUCGGUUUUU | 3035 | 601-623 |
| 84748 | | | | | | | | |
| AD- | A-169175 | AAAUCAGUGGCUUUCCCAAAA | 2992 | 584-604 | A-169176 | UUUUGGGAAAGCCACUGAUUUUC | 3036 | 582-604 |
| 84749 | | | | | | | | |
| AD- | A-169177 | UCCCAACAUUGUCAAGUACAA | 2993 | 501-521 | A-169178 | UUGUACUUGACAAUGUUGGGAAU | 3037 | 499-521 |
| 84750 | | | | | | | | |
| AD- | A-169179 | UGUGCCAUCAGUAUCUUAAUA | 2994 | 241-261 | A-169180 | UAUUAAGAUACUGAUGGCACAAG | 3038 | 239-261 |
| 84751 | | | | | | | | |
| AD- | A-169181 | AAAUUGUCUCCAGCAAAGACU | 2995 | 365-385 | A-169182 | AGUCUUUGCUGGAGACAAUUUUU | 3039 | 363-385 |
| 84752 | | | | | | | | |
| AD- | A-169183 | ACCUUGAACAGUGAAAAAAAA | 2996 | 1610-1630 | A-169184 | UUUUUUUUCACUGUUCAAGGUUU | 3040 | 1608-1630 |
| 84753 | | | | | | | | |
| AD- | A-169185 | AAAACACCAAAAAUUGUCUCA | 2997 | 355-375 | A-169186 | UGAGACAAUUUUUGGUGUUUUAA | 3041 | 353-375 |
| 84754 | | | | | | | | |
| AD- | A-169187 | ACCAAAAAUUGUCUCCAGCAA | 2998 | 360-380 | A-169188 | UUGCUGGAGACAAUUUUUGGUGU | 3042 | 358-380 |
| 84755 | | | | | | | | |
| AD- | A-169189 | CAAGUUCAUCAUUCCCAACAU | 2999 | 489-509 | A-169190 | AUGUUGGGAAUGAUGAACUUGAA | 3043 | 487-509 |
| 84756 | | | | | | | | |
| AD- | A-169191 | GCAAUAUUAUGUGAGAUGUAA | 3000 | 1538-1558 | A-169192 | UUACAUCUCACAUAAUAUUGCAA | 3044 | 1536-1558 |
| 84757 | | | | | | | | |
| AD- | A-169193 | GUCUCAAAAGAUUCAAAGUCA | 3001 | 115-135 | A-169194 | UGACUUUGAAUCUUUUGAGACCG | 3045 | 113-135 |
| 84758 | | | | | | | | |
| AD- | A-169195 | CAUUCCCAACAUUGUCAAGUA | 3002 | 498-518 | A-169196 | UACUUGACAAUGUUGGGAAUGAU | 3046 | 496-518 |
| 84759 | | | | | | | | |
| AD- | A-169197 | AAACCUUGAACAGUGAAAAAA | 3003 | 1608-1628 | A-169198 | UUUUUUCACUGUUCAAGGUUUUA | 3047 | 1606-1628 |
| 84760 | | | | | | | | |
| AD- | A-169199 | UCAAAAGAUUCAAAGUCCAAA | 3004 | 118-138 | A-169200 | UUUGGACUUUGAAUCUUUUGAGA | 3048 | 116-138 |
| 84761 | | | | | | | | |
| AD- | A-169203 | ACAUCUUCAAGUUCAUCAUUA | 3005 | 482-502 | A-169204 | UAAUGAUGAACUUGAAGAUGUUC | 3049 | 480-502 |
| 84762 | | | | | | | | |
| AD- | A-169205 | CAGCUGAUUGUGAAUCUUCUU | 3006 | 157-177 | A-169206 | AAGAAGAUUCACAAUCAGCUGGU | 3050 | 155-177 |
| 84763 | | | | | | | | |
| AD- | A-169207 | CUCAAAAGAUUCAAAGUCCAA | 3007 | 117-137 | A-169208 | UUGGACUUUGAAUCUUUUGAGAC | 3051 | 115-137 |
| 84764 | | | | | | | | |
| AD- | A-169209 | AAAACCGAGUAAUUGGAAGUA | 3008 | 602-622 | A-169210 | UACUUCCAAUUACUCGGUUUUUG | 3052 | 600-622 |
| 84765 | | | | | | | | |
| AD- | A-169213 | UGAUGCAUAUCUUGUGCAUAA | 3009 | 1469-1489 | A-169214 | UUAUGCACAAGAUAUGCAUCAUG | 3053 | 1467-1489 |
| 84766 | | | | | | | | |
| AD- | A-169215 | CCAUCAGUAUCUUAAUGAAGA | 3010 | 245-265 | A-169216 | UCUUCAUUAAGAUACUGAUGGCA | 3054 | 243-265 |
| 84767 | | | | | | | | |
| AD- | A-169217 | AAUCAGUGGCUUUCCCAAAAA | 3011 | 585-605 | A-169218 | UUUUUGGGAAAGCCACUGAUUUU | 3055 | 583-605 |
| 84768 | | | | | | | | |
| AD- | A-169219 | UUAAAACACCAAAAAUUGUCU | 3012 | 353-373 | A-169220 | AGACAAUUUUUGGUGUUUUAAGG | 3056 | 351-373 |
| 84769 | | | | | | | | |
| AD- | A-169221 | CUGAUUGUGAAUCUUCUUAAA | 3013 | 160-180 | A-169222 | UUUAAGAAGAUUCACAAUCAGCU | 3057 | 158-180 |
| 84770 | | | | | | | | |
| AD- | A-169223 | AUAAAACCUUGAACAGUGAAA | 3014 | 1605-1625 | A-169224 | UUUCACUGUUCAAGGUUUUAUUU | 3058 | 1603-1625 |
| 84771 | | | | | | | | |
| AD- | A-169225 | AGUGUCAUGCCAAAUAAAACA | 3015 | 1592-1612 | A-169226 | UGUUUUAUUUGGCAUGACACUUG | 3059 | 1590-1612 |
| 84772 | | | | | | | | |
| AD- | A-169227 | ACACCAAAAAUUGUCUCCAGA | 3016 | 358-378 | A-169228 | UCUGGAGACAAUUUUUGGUGUUU | 3060 | 356-378 |
| 84773 | | | | | | | | |
| AD- | A-169229 | GCAUUGCAAUAUUAUGUGAGA | 3017 | 1533-1553 | A-169230 | UCUCACAUAAUAUUGCAAUGCAC | 3061 | 1531-1553 |
| 84774 | | | | | | | | |
| AD- | A-169231 | GUCAUGCCAAAUAAAACCUUA | 3018 | 1595-1615 | A-169232 | UAAGGUUUUAUUUGGCAUGACAC | 3062 | 1593-1615 |
| 84775 | | | | | | | | |
| AD- | A-169233 | AUAUCUUGUGCAUAAAUGUUA | 3019 | 1475-1495 | A-169234 | UAACAUUUAUGCACAAGAUAUGC | 3063 | 1473-1495 |
| 84776 | | | | | | | | |
| AD- | A-169235 | AAACACCAAAAAUUGUCUCCA | 3020 | 356-376 | A-169236 | UGGAGACAAUUUUUGGUGUUUUA | 3064 | 354-376 |
| 84777 | | | | | | | | |
| AD- | A-169237 | UAACCUGGCUCCAGUGUGUAA | 3021 | 1443-1463 | A-169238 | UUACACACUGGAGCCAGGUUAUA | 3065 | 1441-1463 |
| 84778 | | | | | | | | |
| AD- | A-169239 | UGCAUAUCUUGUGCAUAAAUA | 3022 | 1472-1492 | A-169240 | UAUUUAUGCACAAGAUAUGCAUC | 3066 | 1470-1492 |
| 84779 | | | | | | | | |
| AD- | A-169241 | ACAUUGUCAAGUACAGUCCAA | 3023 | 506-526 | A-169242 | UUGGACUGUACUUGACAAUGUUG | 3067 | 504-526 |
| 84780 | | | | | | | | |
| AD- | A-169243 | AACCUUGAACAGUGAAAAAAA | 3024 | 1609-1629 | A-169244 | UUUUUUUCACUGUUCAAGGUUUU | 3068 | 1607-1629 |
| 84781 | | | | | | | | |
| AD- | A-169245 | GUGUGCAUUGCAAUAUUAUGU | 3025 | 1529-1549 | A-169246 | ACAUAAUAUUGCAAUGCACACUA | 3069 | 1527-1549 |
| 84782 | | | | | | | | |
| AD- | A-169247 | CCAAAAACCGAGUAAUUGGAA | 3026 | 599-619 | A-169248 | UUCCAAUUACUCGGUUUUUGGGA | 3070 | 597-619 |
| 84783 | | | | | | | | |
| AD- | A-169249 | CAAAAACCGAGUAAUUGGAAA | 3027 | 600-620 | A-169250 | UUUCCAAUUACUCGGUUUUUGGG | 3071 | 598-620 |
| 84784 | | | | | | | | |
| AD- | A-169251 | CCAAGUGGUACUUGUGUAGUA | 3028 | 1285-1305 | A-169252 | UACUACACAAGUACCACUUGGCA | 3072 | 1283-1305 |
| 84785 | | | | | | | | |
| AD- | A-169253 | CAGCGAAACGUGAACAUCUUA | 3029 | 469-489 | A-169254 | UAAGAUGUUCACGUUUCGCUGGA | 3073 | 467-489 |
| 84786 | | | | | | | | |
| AD- | A-169255 | UGAUUGUGAAUCUUCUUAAGA | 3030 | 161-181 | A-169256 | UCUUAAGAAGAUUCACAAUCAGC | 3074 | 159-181 |
| 84787 | | | | | | | | |
| AD- | A-169257 | CUUCAAGUUCAUCAUUCCCAA | 3031 | 486-506 | A-169258 | UUGGGAAUGAUGAACUUGAAGAU | 3075 | 484-506 |
| 84788 | | | | | | | | |
| AD- | A-169259 | GGACCAGCUGAUUGUGAAUCU | 3032 | 153-173 | A-169260 | AGAUUCACAAUCAGCUGGUCCUU | 3076 | 151-173 |
| 84789 | | | | | | | | |
| AD- | A-169261 | AUGCCAAAUAAAACCUUGAAA | 3033 | 1598-1618 | A-169262 | UUUCAAGGUUUUAUUUGGCAUGA | 3077 | 1596-1618 |
| 84790 | | | | | | | | |

TABLE 3
MODIFIED MOUSE/RAT CROSS-REACTIVE LDHA iRNA SEQUENCES

| | | SEQ | |
|---|---|---|---|
| | | ID | |
| Duplex Name | Sense Sequence 5′ to 3′ | NO | Antisense Sequence 5′ to 3′ |
| AD-84747 | asascaccAfaAfAfAfuugucuccaaL96 | 3078 | usUfsggaGfaCfAfauuuUfuGfguguususu |
| AD-84748 | asasaccgAfgUfAfAfuuggaagugaL96 | 3079 | usCfsacuUfcCfAfauuaCfuCfgguuususu |
| AD-84749 | asasaucaGfuGfGfCfuuucccaaaaL96 | 3080 | usUfsuugGfgAfAfagccAfcUfgauuususc |
| AD-84750 | uscsccaaCfaUfUfGfucaaguacaaL96 | 3081 | usUfsguaCfuUfGfacaaUfgUfugggasasu |
| AD-84751 | usgsugccAfuCfAfGfuaucuuaauaL96 | 3082 | usAfsuuaAfgAfUfacugAfuGfgcacasasg |
| AD-84752 | asasauugUfcUfCfCfagcaaagacuL96 | 3083 | asGfsucuUfuGfCfuggaGfaCfaauuususu |
| AD-84753 | ascscuugAfaCfAfGfugaaaaaaaaL96 | 3084 | usUfsuuuUfuUfCfacugUfuCfaaggususu |
| AD-84754 | asasaacaCfcAfAfAfaauugucucaL96 | 3085 | usGfsagaCfaAfUfuuuuGfgUfguuuusasa |
| AD-84755 | ascscaaaAfaUfUfGfucuccagcaaL96 | 3086 | usUfsgcuGfgAfGfacaaUfuUfuuggusgsu |
| AD-84756 | csasaguuCfaUfCfAfuucccaacauL96 | 3087 | asUfsguuGfgGfAfaugaUfgAfacuugsasa |
| AD-84757 | gscsaauaUfuAfUfGfugagauguaaL96 | 3088 | usUfsacaUfcUfCfacauAfaUfauugcsasa |
| AD-84758 | gsuscucaAfaAfGfAfuucaaagucaL96 | 3089 | usGfsacuUfuGfAfaucuUfuUfgagacscsg |
| AD-84759 | csasuuccCfaAfCfAfuugucaaguaL96 | 3090 | usAfscuuGfaCfAfauguUfgGfgaaugsasu |
| AD-84760 | asasaccuUfgAfAfCfagugaaaaaaL96 | 3091 | usUfsuuuUfcAfCfuguuCfaAfgguuususa |
| AD-84761 | uscsaaaaGfaUfUfCfaaaguccaaaL96 | 3092 | usUfsuggAfcUfUfugaaUfcUfuuugasgsa |
| AD-84762 | ascsaucuUfcAfAfGfuucaucauuaL96 | 3093 | usAfsaugAfuGfAfacuuGfaAfgaugususc |
| AD-84763 | csasgcugAfuUfGfUfgaaucuucuuL96 | 3094 | asAfsgaaGfaUfUfcacaAfuCfagcugsgsu |
| AD-84764 | csuscaaaAfgAfUfUfcaaaguccaaL96 | 3095 | usUfsggaCfuUfUfgaauCfuUfuugagsasc |
| AD-84765 | asasaaccGfaGfUfAfauuggaaguaL96 | 3096 | usAfscuuCfcAfAfuuacUfcGfguuuususg |
| AD-84766 | usgsaugcAfuAfUfCfuugugcauaaL96 | 3097 | usUfsaugCfaCfAfagauAfuGfcaucasusg |
| AD-84767 | cscsaucaGfuAfUfCfuuaaugaagaL96 | 3098 | usCfsuucAfuUfAfagauAfcUfgauggscsa |
| AD-84768 | asasucagUfgGfCfUfuucccaaaaaL96 | 3099 | usUfsuuuGfgGfAfaagcCfaCfugauususu |
| AD-84769 | ususaaaaCfaCfCfAfaaaauugucuL96 | 3100 | asGfsacaAfuUfUfuuggUfgUfuuuaasgsg |
| AD-84770 | csusgauuGfuGfAfAfucuucuuaaaL96 | 3101 | usUfsuaaGfaAfGfauucAfcAfaucagscsu |
| AD-84771 | asusaaaaCfcUfUfGfaacagugaaaL96 | 3102 | usUfsucaCfuGfUfucaaGfgUfuuuaususu |
| AD-84772 | asgsugucAfuGfCfCfaaauaaaacaL96 | 3103 | usGfsuuuUfaUfUfuggcAfuGfacacususg |
| AD-84773 | ascsaccaAfaAfAfUfugucuccagaL96 | 3104 | usCfsuggAfgAfCfaauuUfuUfggugususu |
| AD-84774 | gscsauugCfaAfUfAfuuaugugagaL96 | 3105 | usCfsucaCfaUfAfauauUfgCfaaugcsasc |
| AD-84775 | gsuscaugCfcAfAfAfuaaaaccuuaL96 | 3106 | usAfsaggUfuUfUfauuuGfgCfaugacsasc |
| AD-84776 | asusaucuUfgUfGfCfauaaauguuaL96 | 3107 | usAfsacaUfuUfAfugcaCfaAfgauausgsc |
| AD-84777 | asasacacCfaAfAfAfauugucuccaL96 | 3108 | usGfsgagAfcAfAfuuuuUfgGfuguuususa |
| AD-84778 | usasaccuGfgCfUfCfcaguguguaaL96 | 3109 | usUfsacaCfaCfUfggagCfcAfgguuasusa |
| AD-84779 | usgscauaUfcUfUfGfugcauaaauaL96 | 3110 | usAfsuuuAfuGfCfacaaGfaUfaugcasusc |
| AD-84780 | ascsauugUfcAfAfGfuacaguccaaL96 | 3111 | usUfsggaCfuGfUfacuuGfaCfaaugususg |
| AD-84781 | asasccuuGfaAfCfAfgugaaaaaaaL96 | 3112 | usUfsuuuUfuCfAfcuguUfcAfagguususu |
| AD-84782 | gsusgugcAfuUfGfCfaauauuauguL96 | 3113 | asCfsauaAfuAfUfugcaAfuGfcacacsusa |
| AD-84783 | cscsaaaaAfcCfGfAfguaauuggaaL96 | 3114 | usUfsccaAfuUfAfcucgGfuUfuuuggsgsa |
| AD-84784 | csasaaaaCfcGfAfGfuaauuggaaaL96 | 3115 | usUfsuccAfaUfUfacucGfgUfuuuugsgsg |
| AD-84785 | cscsaaguGfgUfAfCfuuguguaguaL96 | 3116 | usAfscuaCfaCfAfaguaCfcAfcuuggscsa |
| AD-84786 | csasgcgaAfaCfGfUfgaacaucuuaL96 | 3117 | usAfsagaUfgUfUfcacgUfuUfcgcugsgsa |
| AD-84787 | usgsauugUfgAfAfUfcuucuuaagaL96 | 3118 | usCfsuuaAfgAfAfgauuCfaCfaaucasgsc |
| AD-84788 | csusucaaGfuUfCfAfucauucccaaL96 | 3119 | usUfsgggAfaUfGfaugaAfcUfugaagsasu |
| AD-84789 | gsgsaccaGfcUfGfAfuugugaaucuL96 | 3120 | asGfsauuCfaCfAfaucaGfcUfgguccsusu |
| AD-84790 | asusgccaAfaUfAfAfaaccuugaaaL96 | 3121 | usUfsucaAfgGfUfuuuaUfuUfggcausgsa |

| Duplex Name | SEQ ID NO | mRNA target sequence | SEQ ID NO |
|---|---|---|---|
| AD-84747 | 3122 | AAAACACCAAAAAUUGUCUCCAG | 3166 |
| AD-84748 | 3123 | AAAAACCGAGUAAUUGGAAGUGG | 3167 |
| AD-84749 | 3124 | GAAAAUCAGUGGCUUUCCCAAAA | 3168 |
| AD-84750 | 3125 | AUUCCCAACAUUGUCAAGUACAG | 3169 |
| AD-84751 | 3126 | CUUGUGCCAUCAGUAUCUUAAUG | 3170 |
| AD-84752 | 3127 | AAAAAUUGUCUCCAGCAAAGACU | 3171 |
| AD-84753 | 3128 | AAACCUUGAACAGUGAAAAAAAA | 3172 |
| AD-84754 | 3129 | UUAAAACACCAAAAAUUGUCUCC | 3173 |
| AD-84755 | 3130 | ACACCAAAAAUUGUCUCCAGCAA | 3174 |
| AD-84756 | 3131 | UUCAAGUUCAUCAUUCCCAACAU | 3175 |
| AD-84757 | 3132 | UUGCAAUAUUAUGUGAGAUGUAA | 3176 |
| AD-84758 | 3133 | CGGUCUCAAAAGAUUCAAAGUCC | 3177 |
| AD-84759 | 3134 | AUCAUUCCCAACAUUGUCAAGUA | 3178 |
| AD-84760 | 3135 | UAAAACCUUGAACAGUGAAAAAA | 3179 |
| AD-84761 | 3136 | UCUCAAAAGAUUCAAAGUCCAAG | 3180 |
| AD-84762 | 3137 | GAACAUCUUCAAGUUCAUCAUUC | 3181 |
| AD-84763 | 3138 | ACCAGCUGAUUGUGAAUCUUCUU | 3182 |
| AD-84764 | 3139 | GUCUCAAAAGAUUCAAAGUCCAA | 3183 |
| AD-84765 | 3140 | CAAAAACCGAGUAAUUGGAAGUG | 3184 |
| AD-84766 | 3141 | CAUGAUGCAUAUCUUGUGCAUAA | 3185 |
| AD-84767 | 3142 | UGCCAUCAGUAUCUUAAUGAAGG | 3186 |
| AD-84768 | 3143 | AAAAUCAGUGGCUUUCCCAAAAA | 3187 |
| AD-84769 | 3144 | CCUUAAAACACCAAAAAUUGUCU | 3188 |
| AD-84770 | 3145 | AGCUGAUUGUGAAUCUUCUUAAG | 3189 |
| AD-84771 | 3146 | AAAUAAAACCUUGAACAGUGAAA | 3190 |
| AD-84772 | 3147 | CAAGUGUCAUGCCAAAUAAAACC | 3191 |
| AD-84773 | 3148 | AAACACCAAAAAUUGUCUCCAGC | 3192 |
| AD-84774 | 3149 | GUGCAUUGCAAUAUUAUGUGAGA | 3193 |
| AD-84775 | 3150 | GUGUCAUGCCAAAUAAAACCUUG | 3194 |
| AD-84776 | 3151 | GCAUAUCUUGUGCAUAAAUGUUG | 3195 |
| AD-84777 | 3152 | UAAAACACCAAAAAUUGUCUCCA | 3196 |
| AD-84778 | 3153 | UAUAACCUGGCUCCAGUGUGUAC | 3197 |
| AD-84779 | 3154 | GAUGCAUAUCUUGUGCAUAAAUG | 3198 |
| AD-84780 | 3155 | CAACAUUGUCAAGUACAGUCCAC | 3199 |
| AD-84781 | 3156 | AAAACCUUGAACAGUGAAAAAAA | 3200 |
| AD-84782 | 3157 | UAGUGUGCAUUGCAAUAUUAUGU | 3201 |
| AD-84783 | 3158 | UCCCAAAAACCGAGUAAUUGGAA | 3202 |
| AD-84784 | 3159 | CCCAAAAACCGAGUAAUUGGAAG | 3203 |
| AD-84785 | 3160 | UGCCAAGUGGUACUUGUGUAGUG | 3204 |
| AD-84786 | 3161 | UCCAGCGAAACGUGAACAUCUUC | 3205 |
| AD-84787 | 3162 | GCUGAUUGUGAAUCUUCUUAAGG | 3206 |
| AD-84788 | 3163 | AUCUUCAAGUUCAUCAUUCCCAA | 3207 |
| AD-84789 | 3164 | AAGGACCAGCUGAUUGUGAAUCU | 3208 |
| AD-84790 | 3165 | UCAUGCCAAAUAAAACCUUGAAC | 3209 |

TABLE 4
UNMODIFIED HUMAN/CYNOMOLGUS CROSS-REACTIVE LDHA iRNA SEQUENCES

| | Sense Oligo | | | Position in | Antisense | | | |
|---|---|---|---|---|---|---|---|---|
| Duplex Name | Name | Sense Sequence 5′ to 3′ | SEQ ID NO | NM_005566.3 | Oligo Name | Antisense Sequence 5′ to 3′ | SEQ ID NO | Position in NM_005566.3 |
| AD-159469 | A-314810 | UUUAUCUGAUCUGUGAUUAAA | 3210 | 1347-1367 | A-314811 | UUUAAUCACAGAUCAGAUAAAAA | 3396 | 1345-1367 |
| AD-159607 | A-315086 | ACUGGUUAGUGUGAAAUAGUU | 3211 | 1489-1509 | A-315087 | AACUAUUUCACACUAACCAGUUG | 3397 | 1487-1509 |
| AD-159713 | A-315298 | AACAUGCCUAGUCCAACAUUU | 3212 | 1615-1635 | A-315299 | AAAUGUUGGACUAGGCAUGUUCA | 3398 | 1613-1635 |
| AD-158504 | A-312881 | CAAGUCCAAUAUGGCAACUCU | 3213 | 263-283 | A-312882 | AGAGUUGCCAUAUUGGACUUGGA | 3399 | 261-283 |
| AD-159233 | A-314338 | UCCACCAUGAUUAAGGGUCUU | 3214 | 1092-1112 | A-314339 | AAGACCCUUAAUCAUGGUGGAAA | 3400 | 1090-1112 |
| AD-159411 | A-314694 | UCAUUUCACUGUCUAGGCUAA | 3215 | 1289-1309 | A-314695 | UUAGCCUAGACAGUGAAAUGAUA | 3401 | 1287-1309 |
| AD-159462 | A-314796 | UGUCCUUUUUAUCUGAUCUGU | 3216 | 1340-1360 | A-314797 | ACAGAUCAGAUAAAAAGGACAAC | 3402 | 1338-1360 |
| AD-159742 | A-315356 | CCAGUGUAUAAAUCCAAUAUA | 3217 | 1662-1682 | A-315357 | UAUAUUGGAUUUAUACACUGGAU | 3403 | 1660-1682 |
| AD-159863 | A-315598 | UCCAAGUGUUAUACCAACUAA | 3218 | 1791-1811 | A-315599 | UUAGUUGGUAUAACACUUGGAUA | 3404 | 1789-1811 |
| AD-158626 | A-313124 | GUCAUCGAAGACAAAUUGAAA | 3219 | 429-449 | A-313125 | UUUCAAUUUGUCUUCGAUGACAU | 3405 | 427-449 |
| AD-158687 | A-313246 | GAACACCAAAGAUUGUCUCUA | 3220 | 490-510 | A-313247 | UAGAGACAAUCUUUGGUGUUCUA | 3406 | 488-510 |
| AD-158688 | A-313248 | AACACCAAAGAUUGUCUCUGA | 3221 | 491-511 | A-313249 | UCAGAGACAAUCUUUGGUGUUCU | 3407 | 489-511 |
| AD-159458 | A-314788 | AUGUUGUCCUUUUUAUCUGAU | 3222 | 1336-1356 | A-314789 | AUCAGAUAAAAAGGACAACAUGC | 3408 | 1334-1356 |
| AD-159519 | A-314910 | UCAACUCCUGAAGUUAGAAAU | 3223 | 1401-1421 | A-314911 | AUUUCUAACUUCAGGAGUUGAUG | 3409 | 1399-1421 |
| AD-159858 | A-315588 | AACUAUCCAAGUGUUAUACCA | 3224 | 1786-1806 | A-315589 | UGGUAUAACACUUGGAUAGUUGG | 3410 | 1784-1806 |
| AD-158681 | A-313234 | UCCUUAGAACACCAAAGAUUA | 3225 | 484-504 | A-313235 | UAAUCUUUGGUGUUCUAAGGAAA | 3411 | 482-504 |
| AD-159583 | A-315038 | GGUAUUAAUCUUGUGUAGUCU | 3226 | 1465-1485 | A-315039 | AGACUACACAAGAUUAAUACCAU | 3412 | 1463-1485 |
| AD-159700 | A-315272 | GGCUCCUUCACUGAACAUGCA | 3227 | 1602-1622 | A-315273 | UGCAUGUUCAGUGAAGGAGCCAG | 3413 | 1600-1622 |
| AD-159807 | A-315486 | UAUCAGUAGUGUACAUUACCA | 3228 | 1728-1748 | A-315487 | UGGUAAUGUACACUACUGAUAUA | 3414 | 1726-1748 |
| AD-158673 | A-313218 | CAGCCUUUUCCUUAGAACACA | 3229 | 476-496 | A-313219 | UGUGUUCUAAGGAAAAGGCUGCC | 3415 | 474-496 |
| AD-159608 | A-315088 | CUGGUUAGUGUGAAAUAGUUA | 3230 | 1490-1510 | A-315089 | UAACUAUUUCACACUAACCAGUU | 3416 | 1488-1510 |
| AD-159803 | A-315478 | ACUAUAUCAGUAGUGUACAUU | 3231 | 1724-1744 | A-315479 | AAUGUACACUACUGAUAUAGUUC | 3417 | 1722-1744 |
| AD-159805 | A-315482 | UAUAUCAGUAGUGUACAUUAA | 3232 | 1726-1746 | A-315483 | UUAAUGUACACUACUGAUAUAGU | 3418 | 1724-1746 |
| AD-159489 | A-314850 | GUAAUAUUUUAAGAUGGACUA | 3233 | 1371-1391 | A-314851 | UAGUCCAUCUUAAAAUAUUACUG | 3419 | 1369-1391 |
| AD-159495 | A-314862 | UUUUAAGAUGGACUGGGAAAA | 3234 | 1377-1397 | A-314863 | UUUUCCCAGUCCAUCUUAAAAUA | 3420 | 1375-1397 |
| AD-159609 | A-315090 | UGGUUAGUGUGAAAUAGUUCU | 3235 | 1491-1511 | A-315091 | AGAACUAUUUCACACUAACCAGU | 3421 | 1489-1511 |
| AD-159706 | A-315284 | UUCACUGAACAUGCCUAGUCA | 3236 | 1608-1628 | A-315285 | UGACUAGGCAUGUUCAGUGAAGG | 3422 | 1606-1628 |
| AD-159855 | A-315582 | ACCAACUAUCCAAGUGUUAUA | 3237 | 1783-1803 | A-315583 | UAUAACACUUGGAUAGUUGGUUG | 3423 | 1781-1803 |
| AD-159864 | A-315600 | CCAAGUGUUAUACCAACUAAA | 3238 | 1792-1812 | A-315601 | UUUAGUUGGUAUAACACUUGGAU | 3424 | 1790-1812 |
| AD-158491 | A-312855 | UUCCUUUUGGUUCCAAGUCCA | 3239 | 250-270 | A-312856 | UGGACUUGGAACCAAAAGGAAUC | 3425 | 248-270 |
| AD-158672 | A-313216 | GCAGCCUUUUCCUUAGAACAA | 3240 | 475-495 | A-313217 | UUGUUCUAAGGAAAAGGCUGCCA | 3426 | 473-495 |
| AD-159488 | A-314848 | AGUAAUAUUUUAAGAUGGACU | 3241 | 1370-1390 | A-314849 | AGUCCAUCUUAAAAUAUUACUGC | 3427 | 1368-1390 |
| AD-159553 | A-314978 | AAAAUCCACAGCUAUAUCCUA | 3242 | 1435-1455 | A-314979 | UAGGAUAUAGCUGUGGAUUUUAC | 3428 | 1433-1455 |
| AD-159703 | A-315278 | UCCUUCACUGAACAUGCCUAA | 3243 | 1605-1625 | A-315279 | UUAGGCAUGUUCAGUGAAGGAGC | 3429 | 1603-1625 |
| AD-159708 | A-315288 | CACUGAACAUGCCUAGUCCAA | 3244 | 1610-1630 | A-315289 | UUGGACUAGGCAUGUUCAGUGAA | 3430 | 1608-1630 |
| AD-159866 | A-315604 | AAGUGUUAUACCAACUAAAAC | 3245 | 1794-1814 | A-315605 | GUUUUAGUUGGUAUAACACUUGG | 3431 | 1792-1814 |
| AD-159232 | A-314336 | UUCCACCAUGAUUAAGGGUCU | 3246 | 1091-1111 | A-314337 | AGACCCUUAAUCAUGGUGGAAAC | 3432 | 1089-1111 |
| AD-159712 | A-315296 | GAACAUGCCUAGUCCAACAUU | 3247 | 1614-1634 | A-315297 | AAUGUUGGACUAGGCAUGUUCAG | 3433 | 1612-1634 |
| AD-159808 | A-315488 | AUCAGUAGUGUACAUUACCAU | 3248 | 1729-1749 | A-315489 | AUGGUAAUGUACACUACUGAUAU | 3434 | 1727-1749 |
| AD-159862 | A-315596 | AUCCAAGUGUUAUACCAACUA | 3249 | 1790-1810 | A-315597 | UAGUUGGUAUAACACUUGGAUAG | 3435 | 1788-1810 |
| AD-158503 | A-312879 | CCAAGUCCAAUAUGGCAACUA | 3250 | 262-282 | A-312880 | UAGUUGCCAUAUUGGACUUGGAA | 3436 | 260-282 |
| AD-159311 | A-314494 | AUCUCAGACCUUGUGAAGGUA | 3251 | 1170-1190 | A-314495 | UACCUUCACAAGGUCUGAGAUUC | 3437 | 1168-1190 |
| AD-159412 | A-314696 | CAUUUCACUGUCUAGGCUACA | 3252 | 1290-1310 | A-314697 | UGUAGCCUAGACAGUGAAAUGAU | 3438 | 1288-1310 |
| AD-159558 | A-314988 | CCACAGCUAUAUCCUGAUGCU | 3253 | 1440-1460 | A-314989 | AGCAUCAGGAUAUAGCUGUGGAU | 3439 | 1438-1460 |
| AD-159705 | A-315282 | CUUCACUGAACAUGCCUAGUA | 3254 | 1607-1627 | A-315283 | UACUAGGCAUGUUCAGUGAAGGA | 3440 | 1605-1627 |
| AD-159113 | A-314098 | GUGGUUGAGAGUGCUUAUGAA | 3255 | 972-992 | A-314099 | UUCAUAAGCACUCUCAACCACCU | 3441 | 970-992 |
| AD-159139 | A-314150 | CAAACUCAAAGGCUACACAUA | 3256 | 998-1018 | A-314151 | UAUGUGUAGCCUUUGAGUUUGAU | 3442 | 996-1018 |
| AD-159806 | A-315484 | AUAUCAGUAGUGUACAUUACA | 3257 | 1727-1747 | A-315485 | UGUAAUGUACACUACUGAUAUAG | 3443 | 1725-1747 |
| AD-159853 | A-315578 | CAACCAACUAUCCAAGUGUUA | 3258 | 1781-1801 | A-315579 | UAACACUUGGAUAGUUGGUUGCA | 3444 | 1779-1801 |
| AD-158627 | A-313126 | UCAUCGAAGACAAAUUGAAGA | 3259 | 430-450 | A-313127 | UCUUCAAUUUGUCUUCGAUGACA | 3445 | 428-450 |
| AD-159182 | A-314236 | GCAGAUUUGGCAGAGAGUAUA | 3260 | 1041-1061 | A-314237 | UAUACUCUCUGCCAAAUCUGCUA | 3446 | 1039-1061 |
| AD-159702 | A-315276 | CUCCUUCACUGAACAUGCCUA | 3261 | 1604-1624 | A-315277 | UAGGCAUGUUCAGUGAAGGAGCC | 3447 | 1602-1624 |
| AD-159715 | A-315302 | CAUGCCUAGUCCAACAUUUUU | 3262 | 1617-1637 | A-315303 | AAAAAUGUUGGACUAGGCAUGUU | 3448 | 1615-1637 |
| AD-158575 | A-313022 | UGCCAUCAGUAUCUUAAUGAA | 3263 | 377-397 | A-313023 | UUCAUUAAGAUACUGAUGGCACA | 3449 | 375-397 |
| AD-158576 | A-313024 | GCCAUCAGUAUCUUAAUGAAA | 3264 | 378-398 | A-313025 | UUUCAUUAAGAUACUGAUGGCAC | 3450 | 376-398 |
| AD-158684 | A-313240 | UUAGAACACCAAAGAUUGUCU | 3265 | 487-507 | A-313241 | AGACAAUCUUUGGUGUUCUAAGG | 3451 | 485-507 |
| AD-159410 | A-314692 | AUCAUUUCACUGUCUAGGCUA | 3266 | 1288-1308 | A-314693 | UAGCCUAGACAGUGAAAUGAUAU | 3452 | 1286-1308 |
| AD-159416 | A-314704 | UCACUGUCUAGGCUACAACAA | 3267 | 1294-1314 | A-314705 | UUGUUGUAGCCUAGACAGUGAAA | 3453 | 1292-1314 |
| AD-159738 | A-315348 | GGAUCCAGUGUAUAAAUCCAA | 3268 | 1658-1678 | A-315349 | UUGGAUUUAUACACUGGAUCCCA | 3454 | 1656-1678 |
| AD-159857 | A-315586 | CAACUAUCCAAGUGUUAUACA | 3269 | 1785-1805 | A-315587 | UGUAUAACACUUGGAUAGUUGGU | 3455 | 1783-1805 |
| AD-158497 | A-312867 | UUGGUUCCAAGUCCAAUAUGA | 3270 | 256-276 | A-312868 | UCAUAUUGGACUUGGAACCAAAA | 3456 | 254-276 |
| AD-159124 | A-314120 | UGCUUAUGAGGUGAUCAAACU | 3271 | 983-1003 | A-314121 | AGUUUGAUCACCUCAUAAGCACU | 3457 | 981-1003 |
| AD-159140 | A-314152 | AAACUCAAAGGCUACACAUCA | 3272 | 999-1019 | A-314153 | UGAUGUGUAGCCUUUGAGUUUGA | 3458 | 997-1019 |
| AD-159312 | A-314496 | UCUCAGACCUUGUGAAGGUGA | 3273 | 1171-1191 | A-314497 | UCACCUUCACAAGGUCUGAGAUU | 3459 | 1169-1191 |
| AD-159552 | A-314976 | UAAAAUCCACAGCUAUAUCCU | 3274 | 1434-1454 | A-314977 | AGGAUAUAGCUGUGGAUUUUACA | 3460 | 1432-1454 |
| AD-159704 | A-315280 | CCUUCACUGAACAUGCCUAGU | 3275 | 1606-1626 | A-315281 | ACUAGGCAUGUUCAGUGAAGGAG | 3461 | 1604-1626 |
| AD-159737 | A-315346 | GGGAUCCAGUGUAUAAAUCCA | 3276 | 1657-1677 | A-315347 | UGGAUUUAUACACUGGAUCCCAG | 3462 | 1655-1677 |
| AD-159869 | A-315610 | CAAUAAACCUUGAACAGUGAA | 3277 | 1818-1838 | A-315611 | UUCACUGUUCAAGGUUUAUUGGG | 3463 | 1816-1838 |
| AD-158570 | A-313012 | GGCCUGUGCCAUCAGUAUCUU | 3278 | 371-391 | A-313013 | AAGAUACUGAUGGCACAGGCCAU | 3464 | 369-391 |
| AD-158618 | A-313108 | UUGUUGAUGUCAUCGAAGACA | 3279 | 421-441 | A-313109 | UGUCUUCGAUGACAUCAACAAGA | 3465 | 419-441 |
| AD-159788 | A-315448 | GGAUCUUAUUUUGUGAACUAU | 3280 | 1708-1728 | A-315449 | AUAGUUCACAAAAUAAGAUCCUU | 3466 | 1706-1728 |
| AD-159786 | A-315444 | AAGGAUCUUAUUUUGUGAACU | 3281 | 1706-1726 | A-315445 | AGUUCACAAAAUAAGAUCCUUUG | 3467 | 1704-1726 |
| AD-159760 | A-315392 | AUCAUGUCUUGUGCAUAAUUA | 3282 | 1680-1700 | A-315393 | UAAUUAUGCACAAGACAUGAUAU | 3468 | 1678-1700 |
| AD-159404 | A-314680 | UGUCAUAUCAUUUCACUGUCU | 3283 | 1282-1302 | A-314681 | AGACAGUGAAAUGAUAUGACAUC | 3469 | 1280-1302 |
| AD-159406 | A-314684 | UCAUAUCAUUUCACUGUCUAA | 3284 | 1284-1304 | A-314685 | UUAGACAGUGAAAUGAUAUGACA | 3470 | 1282-1304 |
| AD-158536 | A-312944 | AUUUAUAAUCUUCUAAAGGAA | 3285 | 297-317 | A-312945 | UUCCUUUAGAAGAUUAUAAAUCA | 3471 | 295-317 |
| AD-159545 | A-314962 | UGGUUUGUAAAAUCCACAGCU | 3286 | 1427-1447 | A-314963 | AGCUGUGGAUUUUACAAACCAUU | 3472 | 1425-1447 |
| AD-159574 | A-315020 | AUGCUGGAUGGUAUUAAUCUU | 3287 | 1456-1476 | A-315021 | AAGAUUAAUACCAUCCAGCAUCA | 3473 | 1454-1476 |
| AD-159802 | A-315476 | AACUAUAUCAGUAGUGUACAU | 3288 | 1723-1743 | A-315477 | AUGUACACUACUGAUAUAGUUCA | 3474 | 1721-1743 |
| AD-159518 | A-314908 | AUCAACUCCUGAAGUUAGAAA | 3289 | 1400-1420 | A-314909 | UUUCUAACUUCAGGAGUUGAUGU | 3475 | 1398-1420 |
| AD-159577 | A-315026 | CUGGAUGGUAUUAAUCUUGUA | 3290 | 1459-1479 | A-315027 | UACAAGAUUAAUACCAUCCAGCA | 3476 | 1457-1479 |
| AD-159409 | A-314690 | UAUCAUUUCACUGUCUAGGCU | 3291 | 1287-1307 | A-314691 | AGCCUAGACAGUGAAAUGAUAUG | 3477 | 1285-1307 |
| AD-159551 | A-314974 | GUAAAAUCCACAGCUAUAUCA | 3292 | 1433-1453 | A-314975 | UGAUAUAGCUGUGGAUUUUACAA | 3478 | 1431-1453 |
| AD-159276 | A-314424 | UCCUUAGUGUUCCUUGCAUUU | 3293 | 1135-1155 | A-314425 | AAAUGCAAGGAACACUAAGGAAG | 3479 | 1133-1155 |
| AD-159407 | A-314686 | CAUAUCAUUUCACUGUCUAGA | 3294 | 1285-1305 | A-314687 | UCUAGACAGUGAAAUGAUAUGAC | 3480 | 1283-1305 |
| AD-159515 | A-314902 | AACAUCAACUCCUGAAGUUAA | 3295 | 1397-1417 | A-314903 | UUAACUUCAGGAGUUGAUGUUUU | 3481 | 1395-1417 |
| AD-159570 | A-315012 | CCUGAUGCUGGAUGGUAUUAA | 3296 | 1452-1472 | A-315013 | UUAAUACCAUCCAGCAUCAGGAU | 3482 | 1450-1472 |
| AD-159849 | A-315570 | AAUGCAACCAACUAUCCAAGU | 3297 | 1777-1797 | A-315571 | ACUUGGAUAGUUGGUUGCAUUGU | 3483 | 1775-1797 |
| AD-159252 | A-314376 | UUUACGGAAUAAAGGAUGAUA | 3298 | 1111-1131 | A-314377 | UAUCAUCCUUUAUUCCGUAAAGA | 3484 | 1109-1131 |
| AD-159275 | A-314422 | UUCCUUAGUGUUCCUUGCAUU | 3299 | 1134-1154 | A-314423 | AAUGCAAGGAACACUAAGGAAGA | 3485 | 1132-1154 |
| AD-159848 | A-315568 | CAAUGCAACCAACUAUCCAAA | 3300 | 1776-1796 | A-315569 | UUUGGAUAGUUGGUUGCAUUGUU | 3486 | 1774-1796 |
| AD-159184 | A-314240 | AGAUUUGGCAGAGAGUAUAAU | 3301 | 1043-1063 | A-314241 | AUUAUACUCUCUGCCAAAUCUGC | 3487 | 1041-1063 |
| AD-159231 | A-314334 | UUUCCACCAUGAUUAAGGGUA | 3302 | 1090-1110 | A-314335 | UACCCUUAAUCAUGGUGGAAACU | 3488 | 1088-1110 |
| AD-159607 | A-315086 | ACUGGUUAGUGUGAAAUAGUU | 3303 | 1489-1509 | A-315087 | AACUAUUUCACACUAACCAGUUG | 3489 | 1487-1509 |
| AD-158504 | A-312881 | CAAGUCCAAUAUGGCAACUCU | 3304 | 263-283 | A-312882 | AGAGUUGCCAUAUUGGACUUGGA | 3490 | 261-283 |
| AD-159233 | A-314338 | UCCACCAUGAUUAAGGGUCUU | 3305 | 1092-1112 | A-314339 | AAGACCCUUAAUCAUGGUGGAAA | 3491 | 1090-1112 |
| AD-159411 | A-314694 | UCAUUUCACUGUCUAGGCUAA | 3306 | 1289-1309 | A-314695 | UUAGCCUAGACAGUGAAAUGAUA | 3492 | 1287-1309 |
| AD-159462 | A-314796 | UGUCCUUUUUAUCUGAUCUGU | 3307 | 1340-1360 | A-314797 | ACAGAUCAGAUAAAAAGGACAAC | 3493 | 1338-1360 |
| AD-159742 | A-315356 | CCAGUGUAUAAAUCCAAUAUA | 3308 | 1662-1682 | A-315357 | UAUAUUGGAUUUAUACACUGGAU | 3494 | 1660-1682 |
| AD-159863 | A-315598 | UCCAAGUGUUAUACCAACUAA | 3309 | 1791-1811 | A-315599 | UUAGUUGGUAUAACACUUGGAUA | 3495 | 1789-1811 |
| AD-158687 | A-313246 | GAACACCAAAGAUUGUCUCUA | 3310 | 490-510 | A-313247 | UAGAGACAAUCUUUGGUGUUCUA | 3496 | 488-510 |
| AD-158688 | A-313248 | AACACCAAAGAUUGUCUCUGA | 3311 | 491-511 | A-313249 | UCAGAGACAAUCUUUGGUGUUCU | 3497 | 489-511 |
| AD-159458 | A-314788 | AUGUUGUCCUUUUUAUCUGAU | 3312 | 1336-1356 | A-314789 | AUCAGAUAAAAAGGACAACAUGC | 3498 | 1334-1356 |
| AD-159519 | A-314910 | UCAACUCCUGAAGUUAGAAAU | 3313 | 1401-1421 | A-314911 | AUUUCUAACUUCAGGAGUUGAUG | 3499 | 1399-1421 |
| AD-159858 | A-315588 | AACUAUCCAAGUGUUAUACCA | 3314 | 1786-1806 | A-315589 | UGGUAUAACACUUGGAUAGUUGG | 3500 | 1784-1806 |
| AD-159583 | A-315038 | GGUAUUAAUCUUGUGUAGUCU | 3315 | 1465-1485 | A-315039 | AGACUACACAAGAUUAAUACCAU | 3501 | 1463-1485 |
| AD-159700 | A-315272 | GGCUCCUUCACUGAACAUGCA | 3316 | 1602-1622 | A-315273 | UGCAUGUUCAGUGAAGGAGCCAG | 3502 | 1600-1622 |
| AD-159807 | A-315486 | UAUCAGUAGUGUACAUUACCA | 3317 | 1728-1748 | A-315487 | UGGUAAUGUACACUACUGAUAUA | 3503 | 1726-1748 |
| AD-158673 | A-313218 | CAGCCUUUUCCUUAGAACACA | 3318 | 476-496 | A-313219 | UGUGUUCUAAGGAAAAGGCUGCC | 3504 | 474-496 |
| AD-159608 | A-315088 | CUGGUUAGUGUGAAAUAGUUA | 3319 | 1490-1510 | A-315089 | UAACUAUUUCACACUAACCAGUU | 3505 | 1488-1510 |
| AD-159803 | A-315478 | ACUAUAUCAGUAGUGUACAUU | 3320 | 1724-1744 | A-315479 | AAUGUACACUACUGAUAUAGUUC | 3506 | 1722-1744 |
| AD-159805 | A-315482 | UAUAUCAGUAGUGUACAUUAA | 3321 | 1726-1746 | A-315483 | UUAAUGUACACUACUGAUAUAGU | 3507 | 1724-1746 |
| AD-159489 | A-314850 | GUAAUAUUUUAAGAUGGACUA | 3322 | 1371-1391 | A-314851 | UAGUCCAUCUUAAAAUAUUACUG | 3508 | 1369-1391 |
| AD-159495 | A-314862 | UUUUAAGAUGGACUGGGAAAA | 3323 | 1377-1397 | A-314863 | UUUUCCCAGUCCAUCUUAAAAUA | 3509 | 1375-1397 |
| AD-159706 | A-315284 | UUCACUGAACAUGCCUAGUCA | 3324 | 1608-1628 | A-315285 | UGACUAGGCAUGUUCAGUGAAGG | 3510 | 1606-1628 |
| AD-159855 | A-315582 | ACCAACUAUCCAAGUGUUAUA | 3325 | 1783-1803 | A-315583 | UAUAACACUUGGAUAGUUGGUUG | 3511 | 1781-1803 |
| AD-159864 | A-315600 | CCAAGUGUUAUACCAACUAAA | 3326 | 1792-1812 | A-315601 | UUUAGUUGGUAUAACACUUGGAU | 3512 | 1790-1812 |
| AD-159488 | A-314848 | AGUAAUAUUUUAAGAUGGACU | 3327 | 1370-1390 | A-314849 | AGUCCAUCUUAAAAUAUUACUGC | 3513 | 1368-1390 |
| AD-159553 | A-314978 | AAAAUCCACAGCUAUAUCCUA | 3328 | 1435-1455 | A-314979 | UAGGAUAUAGCUGUGGAUUUUAC | 3514 | 1433-1455 |
| AD-159703 | A-315278 | UCCUUCACUGAACAUGCCUAA | 3329 | 1605-1625 | A-315279 | UUAGGCAUGUUCAGUGAAGGAGC | 3515 | 1603-1625 |
| AD-159708 | A-315288 | CACUGAACAUGCCUAGUCCAA | 3330 | 1610-1630 | A-315289 | UUGGACUAGGCAUGUUCAGUGAA | 3516 | 1608-1630 |
| AD-159866 | A-315604 | AAGUGUUAUACCAACUAAAAC | 3331 | 1794-1814 | A-315605 | GUUUUAGUUGGUAUAACACUUGG | 3517 | 1792-1814 |
| AD-159232 | A-314336 | UUCCACCAUGAUUAAGGGUCU | 3332 | 1091-1111 | A-314337 | AGACCCUUAAUCAUGGUGGAAAC | 3518 | 1089-1111 |
| AD-159712 | A-315296 | GAACAUGCCUAGUCCAACAUU | 3333 | 1614-1634 | A-315297 | AAUGUUGGACUAGGCAUGUUCAG | 3519 | 1612-1634 |
| AD-159808 | A-315488 | AUCAGUAGUGUACAUUACCAU | 3334 | 1729-1749 | A-315489 | AUGGUAAUGUACACUACUGAUAU | 3520 | 1727-1749 |
| AD-159862 | A-315596 | AUCCAAGUGUUAUACCAACUA | 3335 | 1790-1810 | A-315597 | UAGUUGGUAUAACACUUGGAUAG | 3521 | 1788-1810 |
| AD-158503 | A-312879 | CCAAGUCCAAUAUGGCAACUA | 3336 | 262-282 | A-312880 | UAGUUGCCAUAUUGGACUUGGAA | 3522 | 260-282 |
| AD-159412 | A-314696 | CAUUUCACUGUCUAGGCUACA | 3337 | 1290-1310 | A-314697 | UGUAGCCUAGACAGUGAAAUGAU | 3523 | 1288-1310 |
| AD-159558 | A-314988 | CCACAGCUAUAUCCUGAUGCU | 3338 | 1440-1460 | A-314989 | AGCAUCAGGAUAUAGCUGUGGAU | 3524 | 1438-1460 |
| AD-159705 | A-315282 | CUUCACUGAACAUGCCUAGUA | 3339 | 1607-1627 | A-315283 | UACUAGGCAUGUUCAGUGAAGGA | 3525 | 1605-1627 |
| AD-159113 | A-314098 | GUGGUUGAGAGUGCUUAUGAA | 3340 | 972-992 | A-314099 | UUCAUAAGCACUCUCAACCACCU | 3526 | 970-992 |
| AD-159806 | A-315484 | AUAUCAGUAGUGUACAUUACA | 3341 | 1727-1747 | A-315485 | UGUAAUGUACACUACUGAUAUAG | 3527 | 1725-1747 |
| AD-159853 | A-315578 | CAACCAACUAUCCAAGUGUUA | 3342 | 1781-1801 | A-315579 | UAACACUUGGAUAGUUGGUUGCA | 3528 | 1779-1801 |
| AD-159182 | A-314236 | GCAGAUUUGGCAGAGAGUAUA | 3343 | 1041-1061 | A-314237 | UAUACUCUCUGCCAAAUCUGCUA | 3529 | 1039-1061 |
| AD-159702 | A-315276 | CUCCUUCACUGAACAUGCCUA | 3344 | 1604-1624 | A-315277 | UAGGCAUGUUCAGUGAAGGAGCC | 3530 | 1602-1624 |
| AD-159715 | A-315302 | CAUGCCUAGUCCAACAUUUUU | 3345 | 1617-1637 | A-315303 | AAAAAUGUUGGACUAGGCAUGUU | 3531 | 1615-1637 |
| AD-158575 | A-313022 | UGCCAUCAGUAUCUUAAUGAA | 3346 | 377-397 | A-313023 | UUCAUUAAGAUACUGAUGGCACA | 3532 | 375-397 |
| AD-158576 | A-313024 | GCCAUCAGUAUCUUAAUGAAA | 3347 | 378-398 | A-313025 | UUUCAUUAAGAUACUGAUGGCAC | 3533 | 376-398 |
| AD-158684 | A-313240 | UUAGAACACCAAAGAUUGUCU | 3348 | 487-507 | A-313241 | AGACAAUCUUUGGUGUUCUAAGG | 3534 | 485-507 |
| AD-159410 | A-314692 | AUCAUUUCACUGUCUAGGCUA | 3349 | 1288-1308 | A-314693 | UAGCCUAGACAGUGAAAUGAUAU | 3535 | 1286-1308 |
| AD-159416 | A-314704 | UCACUGUCUAGGCUACAACAA | 3350 | 1294-1314 | A-314705 | UUGUUGUAGCCUAGACAGUGAAA | 3536 | 1292-1314 |
| AD-159857 | A-315586 | CAACUAUCCAAGUGUUAUACA | 3351 | 1785-1805 | A-315587 | UGUAUAACACUUGGAUAGUUGGU | 3537 | 1783-1805 |
| AD-158497 | A-312867 | UUGGUUCCAAGUCCAAUAUGA | 3352 | 256-276 | A-312868 | UCAUAUUGGACUUGGAACCAAAA | 3538 | 254-276 |
| AD-159124 | A-314120 | UGCUUAUGAGGUGAUCAAACU | 3353 | 983-1003 | A-314121 | AGUUUGAUCACCUCAUAAGCACU | 3539 | 981-1003 |
| AD-159312 | A-314496 | UCUCAGACCUUGUGAAGGUGA | 3354 | 1171-1191 | A-314497 | UCACCUUCACAAGGUCUGAGAUU | 3540 | 1169-1191 |
| AD-159552 | A-314976 | UAAAAUCCACAGCUAUAUCCU | 3355 | 1434-1454 | A-314977 | AGGAUAUAGCUGUGGAUUUUACA | 3541 | 1432-1454 |
| AD-159704 | A-315280 | CCUUCACUGAACAUGCCUAGU | 3356 | 1606-1626 | A-315281 | ACUAGGCAUGUUCAGUGAAGGAG | 3542 | 1604-1626 |
| AD-159737 | A-315346 | GGGAUCCAGUGUAUAAAUCCA | 3357 | 1657-1677 | A-315347 | UGGAUUUAUACACUGGAUCCCAG | 3543 | 1655-1677 |
| AD-159869 | A-315610 | CAAUAAACCUUGAACAGUGAA | 3358 | 1818-1838 | A-315611 | UUCACUGUUCAAGGUUUAUUGGG | 3544 | 1816-1838 |
| AD-158570 | A-313012 | GGCCUGUGCCAUCAGUAUCUU | 3359 | 371-391 | A-313013 | AAGAUACUGAUGGCACAGGCCAU | 3545 | 369-391 |
| AD-158618 | A-313108 | UUGUUGAUGUCAUCGAAGACA | 3360 | 421-441 | A-313109 | UGUCUUCGAUGACAUCAACAAGA | 3546 | 419-441 |
| AD-159184 | A-314240 | AGAUUUGGCAGAGAGUAUAAU | 3361 | 1043-1063 | A-314241 | AUUAUACUCUCUGCCAAAUCUGC | 3547 | 1041-1063 |
| AD-159231 | A-314334 | UUUCCACCAUGAUUAAGGGUA | 3362 | 1090-1110 | A-314335 | UACCCUUAAUCAUGGUGGAAACU | 3548 | 1088-1110 |
| AD-159423 | A-314718 | CUAGGCUACAACAGGAUUCUA | 3363 | 1301-1321 | A-314719 | UAGAAUCCUGUUGUAGCCUAGAC | 3549 | 1299-1321 |
| AD-159446 | A-314764 | UGGAGGUUGUGCAUGUUGUCA | 3364 | 1324-1344 | A-314765 | UGACAACAUGCACAACCUCCACC | 3550 | 1322-1344 |
| AD-159701 | A-315274 | GCUCCUUCACUGAACAUGCCU | 3365 | 1603-1623 | A-315275 | AGGCAUGUUCAGUGAAGGAGCCA | 3551 | 1601-1623 |
| AD-158494 | A-312861 | CUUUUGGUUCCAAGUCCAAUA | 3366 | 253-273 | A-312862 | UAUUGGACUUGGAACCAAAAGGA | 3552 | 251-273 |
| AD-158571 | A-313014 | GCCUGUGCCAUCAGUAUCUUA | 3367 | 372-392 | A-313015 | UAAGAUACUGAUGGCACAGGCCA | 3553 | 370-392 |
| AD-159125 | A-314122 | GCUUAUGAGGUGAUCAAACUA | 3368 | 984-1004 | A-314123 | UAGUUUGAUCACCUCAUAAGCAC | 3554 | 982-1004 |
| AD-159126 | A-314124 | CUUAUGAGGUGAUCAAACUCA | 3369 | 985-1005 | A-314125 | UGAGUUUGAUCACCUCAUAAGCA | 3555 | 983-1005 |
| AD-159287 | A-314446 | CCUUGCAUUUUGGGACAGAAU | 3370 | 1146-1166 | A-314447 | AUUCUGUCCCAAAAUGCAAGGAA | 3556 | 1144-1166 |
| AD-158499 | A-312871 | GGUUCCAAGUCCAAUAUGGCA | 3371 | 258-278 | A-312872 | UGCCAUAUUGGACUUGGAACCAA | 3557 | 256-278 |
| AD-159417 | A-314706 | CACUGUCUAGGCUACAACAGA | 3372 | 1295-1315 | A-314707 | UCUGUUGUAGCCUAGACAGUGAA | 3558 | 1293-1315 |
| AD-159418 | A-314708 | ACUGUCUAGGCUACAACAGGA | 3373 | 1296-1316 | A-314709 | UCCUGUUGUAGCCUAGACAGUGA | 3559 | 1294-1316 |
| AD-158550 | A-312972 | AAUAAGAUUACAGUUGUUGGA | 3374 | 333-353 | A-312973 | UCCAACAACUGUAAUCUUAUUCU | 3560 | 331-353 |
| AD-159116 | A-314104 | GUUGAGAGUGCUUAUGAGGUA | 3375 | 975-995 | A-314105 | UACCUCAUAAGCACUCUCAACCA | 3561 | 973-995 |
| AD-159421 | A-314714 | GUCUAGGCUACAACAGGAUUA | 3376 | 1299-1319 | A-314715 | UAAUCCUGUUGUAGCCUAGACAG | 3562 | 1297-1319 |
| AD-159422 | A-314716 | UCUAGGCUACAACAGGAUUCU | 3377 | 1300-1320 | A-314717 | AGAAUCCUGUUGUAGCCUAGACA | 3563 | 1298-1320 |
| AD-159445 | A-314762 | GUGGAGGUUGUGCAUGUUGUA | 3378 | 1323-1343 | A-314763 | UACAACAUGCACAACCUCCACCU | 3564 | 1321-1343 |
| AD-159130 | A-314132 | UGAGGUGAUCAAACUCAAAGA | 3379 | 989-1009 | A-314133 | UCUUUGAGUUUGAUCACCUCAUA | 3565 | 987-1009 |
| AD-159134 | A-314140 | GUGAUCAAACUCAAAGGCUAA | 3380 | 993-1013 | A-314141 | UUAGCCUUUGAGUUUGAUCACCU | 3566 | 991-1013 |
| AD-159343 | A-314558 | UGAGGAAGAGGCCCGUUUGAA | 3381 | 1202-1222 | A-314559 | UUCAAACGGGCCUCUUCCUCAGA | 3567 | 1200-1222 |
| AD-159105 | A-314082 | ACAAGCAGGUGGUUGAGAGUA | 3382 | 964-984 | A-314083 | UACUCUCAACCACCUGCUUGUGA | 3568 | 962-984 |
| AD-159183 | A-314238 | CAGAUUUGGCAGAGAGUAUAA | 3383 | 1042-1062 | A-314239 | UUAUACUCUCUGCCAAAUCUGCU | 3569 | 1040-1062 |
| AD-159123 | A-314118 | GUGCUUAUGAGGUGAUCAAAC | 3384 | 982-1002 | A-314119 | GUUUGAUCACCUCAUAAGCACUC | 3570 | 980-1002 |
| AD-159181 | A-314234 | AGCAGAUUUGGCAGAGAGUAU | 3385 | 1040-1060 | A-314235 | AUACUCUCUGCCAAAUCUGCUAC | 3571 | 1038-1060 |
| AD-159186 | A-314244 | AUUUGGCAGAGAGUAUAAUGA | 3386 | 1045-1065 | A-314245 | UCAUUAUACUCUCUGCCAAAUCU | 3572 | 1043-1065 |
| AD-159187 | A-314246 | UUUGGCAGAGAGUAUAAUGAA | 3387 | 1046-1066 | A-314247 | UUCAUUAUACUCUCUGCCAAAUC | 3573 | 1044-1066 |
| AD-159288 | A-314448 | CUUGCAUUUUGGGACAGAAUA | 3388 | 1147-1167 | A-314449 | UAUUCUGUCCCAAAAUGCAAGGA | 3574 | 1145-1167 |
| AD-159306 | A-314484 | AUGGAAUCUCAGACCUUGUGA | 3389 | 1165-1185 | A-314485 | UCACAAGGUCUGAGAUUCCAUUC | 3575 | 1163-1185 |
| AD-159559 | A-314990 | CACAGCUAUAUCCUGAUGCUA | 3390 | 1441-1461 | A-314991 | UAGCAUCAGGAUAUAGCUGUGGA | 3576 | 1439-1461 |
| AD-159344 | A-314560 | GAGGAAGAGGCCCGUUUGAAA | 3391 | 1203-1223 | A-314561 | UUUCAAACGGGCCUCUUCCUCAG | 3577 | 1201-1223 |
| AD-159341 | A-314554 | UCUGAGGAAGAGGCCCGUUUA | 3392 | 1200-1220 | A-314555 | UAAACGGGCCUCUUCCUCAGAAG | 3578 | 1198-1220 |
| AD-159729 | A-315330 | CACAUCCUGGGAUCCAGUGUA | 3393 | 1649-1669 | A-315331 | UACACUGGAUCCCAGGAUGUGAC | 3579 | 1647-1669 |
| AD-158674 | A-313220 | AGCCUUUUCCUUAGAACACCA | 3394 | 477-497 | A-313221 | UGGUGUUCUAAGGAAAAGGCUGC | 3580 | 475-497 |
| AD-159604 | A-315080 | UCAACUGGUUAGUGUGAAAUA | 3395 | 1486-1506 | A-315081 | UAUUUCACACUAACCAGUUGAAG | 3581 | 1484-1506 |

TABLE 5
MODIFIED HUMAN/CYNOMOLGUS CROSS-REACTIVE LDHA iRNA SEQUENCES

| | | SEQ | |
|---|---|---|---|
| Duplex | | ID | |
| Name | Sense Sequence 5′ to 3′ | NO | Antisense Sequence 5′ to 3′ |
| AD-159469 | ususuaucUfgAfUfCfugugauuaaaL96 | 3582 | usUfsuaaUfcAfCfagauCfaGfauaaasasa |
| AD-159607 | ascsugguUfaGfUfGfugaaauaguuL96 | 3583 | asAfscuaUfuUfCfacacUfaAfccagususg |
| AD-159713 | asascaugCfcUfAfGfuccaacauuuL96 | 3584 | asAfsaugUfuGfGfacuaGfgCfauguuscsa |
| AD-158504 | csasagucCfaAfUfAfuggcaacucuL96 | 3585 | asGfsaguUfgCfCfauauUfgGfacuugsgsa |
| AD-159233 | uscscaccAfuGfAfUfuaagggucuuL96 | 3586 | asAfsgacCfcUfUfaaucAfuGfguggasasa |
| AD-159411 | uscsauuuCfaCfUfGfucuaggcuaaL96 | 3587 | usUfsagcCfuAfGfacagUfgAfaaugasusa |
| AD-159462 | usgsuccuUfuUfUfAfucugaucuguL96 | 3588 | asCfsagaUfcAfGfauaaAfaAfggacasasc |
| AD-159742 | cscsagugUfaUfAfAfauccaauauaL96 | 3589 | usAfsuauUfgGfAfuuuaUfaCfacuggsasu |
| AD-159863 | uscscaagUfgUfUfAfuaccaacuaaL96 | 3590 | usUfsaguUfgGfUfauaaCfaCfuuggasusa |
| AD-158626 | gsuscaucGfaAfGfAfcaaauugaaaL96 | 3591 | usUfsucaAfuUfUfgucuUfcGfaugacsasu |
| AD-158687 | gsasacacCfaAfAfGfauugucucuaL96 | 3592 | usAfsgagAfcAfAfucuuUfgGfuguucsusa |
| AD-158688 | asascaccAfaAfGfAfuugucucugaL96 | 3593 | usCfsagaGfaCfAfaucuUfuGfguguuscsu |
| AD-159458 | asusguugUfcCfUfUfuuuaucugauL96 | 3594 | asUfscagAfuAfAfaaagGfaCfaacausgsc |
| AD-159519 | uscsaacuCfcUfGfAfaguuagaaauL96 | 3595 | asUfsuucUfaAfCfuucaGfgAfguugasusg |
| AD-159858 | asascuauCfcAfAfGfuguuauaccaL96 | 3596 | usGfsguaUfaAfCfacuuGfgAfuaguusgsg |
| AD-158681 | uscscuuaGfaAfCfAfccaaagauuaL96 | 3597 | usAfsaucUfuUfGfguguUfcUfaaggasasa |
| AD-159583 | gsgsuauuAfaUfCfUfuguguagucuL96 | 3598 | asGfsacuAfcAfCfaagaUfuAfauaccsasu |
| AD-159700 | gsgscuccUfuCfAfCfugaacaugcaL96 | 3599 | usGfscauGfuUfCfagugAfaGfgagccsasg |
| AD-159807 | usasucagUfaGfUfGfuacauuaccaL96 | 3600 | usGfsguaAfuGfUfacacUfaCfugauasusa |
| AD-158673 | csasgccuUfuUfCfCfuuagaacacaL96 | 3601 | usGfsuguUfcUfAfaggaAfaAfggcugscsc |
| AD-159608 | csusgguuAfgUfGfUfgaaauaguuaL96 | 3602 | usAfsacuAfuUfUfcacaCfuAfaccagsusu |
| AD-159803 | ascsuauaUfcAfGfUfaguguacauuL96 | 3603 | asAfsuguAfcAfCfuacuGfaUfauagususc |
| AD-159805 | usasuaucAfgUfAfGfuguacauuaaL96 | 3604 | usUfsaauGfuAfCfacuaCfuGfauauasgsu |
| AD-159489 | gsusaauaUfuUfUfAfagauggacuaL96 | 3605 | usAfsgucCfaUfCfuuaaAfaUfauuacsusg |
| AD-159495 | ususuuaaGfaUfGfGfacugggaaaaL96 | 3606 | usUfsuucCfcAfGfuccaUfcUfuaaaasusa |
| AD-159609 | usgsguuaGfuGfUfGfaaauaguucuL96 | 3607 | asGfsaacUfaUfUfucacAfcUfaaccasgsu |
| AD-159706 | ususcacuGfaAfCfAfugccuagucaL96 | 3608 | usGfsacuAfgGfCfauguUfcAfgugaasgsg |
| AD-159855 | ascscaacUfaUfCfCfaaguguuauaL96 | 3609 | usAfsuaaCfaCfUfuggaUfaGfuuggususg |
| AD-159864 | cscsaaguGfuUfAfUfaccaacuaaaL96 | 3610 | usUfsuagUfuGfGfuauaAfcAfcuuggsasu |
| AD-158491 | ususccuuUfuGfGfUfuccaaguccaL96 | 3611 | usGfsgacUfuGfGfaaccAfaAfaggaasusc |
| AD-158672 | gscsagccUfuUfUfCfcuuagaacaaL96 | 3612 | usUfsguuCfuAfAfggaaAfaGfgcugcscsa |
| AD-159488 | asgsuaauAfuUfUfUfaagauggacuL96 | 3613 | asGfsuccAfuCfUfuaaaAfuAfuuacusgsc |
| AD-159553 | asasaaucCfaCfAfGfcuauauccuaL96 | 3614 | usAfsggaUfaUfAfgcugUfgGfauuuusasc |
| AD-159703 | uscscuucAfcUfGfAfacaugccuaaL96 | 3615 | usUfsaggCfaUfGfuucaGfuGfaaggasgsc |
| AD-159708 | csascugaAfcAfUfGfccuaguccaaL96 | 3616 | usUfsggaCfuAfGfgcauGfuUfcagugsasa |
| AD-159866 | asasguguUfaUfAfCfcaacuaaaacL96 | 3617 | gsUfsuuuAfgUfUfgguaUfaAfcacuusgsg |
| AD-159232 | ususccacCfaUfGfAfuuaagggucuL96 | 3618 | asGfsaccCfuUfAfaucaUfgGfuggaasasc |
| AD-159712 | gsasacauGfcCfUfAfguccaacauuL96 | 3619 | asAfsuguUfgGfAfcuagGfcAfuguucsasg |
| AD-159808 | asuscaguAfgUfGfUfacauuaccauL96 | 3620 | asUfsgguAfaUfGfuacaCfuAfcugausasu |
| AD-159862 | asusccaaGfuGfUfUfauaccaacuaL96 | 3621 | usAfsguuGfgUfAfuaacAfcUfuggausasg |
| AD-158503 | cscsaaguCfcAfAfUfauggcaacuaL96 | 3622 | usAfsguuGfcCfAfuauuGfgAfcuuggsasa |
| AD-159311 | asuscucaGfaCfCfUfugugaagguaL96 | 3623 | usAfsccuUfcAfCfaaggUfcUfgagaususc |
| AD-159412 | csasuuucAfcUfGfUfcuaggcuacaL96 | 3624 | usGfsuagCfcUfAfgacaGfuGfaaaugsasu |
| AD-159558 | cscsacagCfuAfUfAfuccugaugcuL96 | 3625 | asGfscauCfaGfGfauauAfgCfuguggsasu |
| AD-159705 | csusucacUfgAfAfCfaugccuaguaL96 | 3626 | usAfscuaGfgCfAfuguuCfaGfugaagsgsa |
| AD-159113 | gsusgguuGfaGfAfGfugcuuaugaaL96 | 3627 | usUfscauAfaGfCfacucUfcAfaccacscsu |
| AD-159139 | csasaacuCfaAfAfGfgcuacacauaL96 | 3628 | usAfsuguGfuAfGfccuuUfgAfguuugsasu |
| AD-159806 | asusaucaGfuAfGfUfguacauuacaL96 | 3629 | usGfsuaaUfgUfAfcacuAfcUfgauausasg |
| AD-159853 | csasaccaAfcUfAfUfccaaguguuaL96 | 3630 | usAfsacaCfuUfGfgauaGfuUfgguugscsa |
| AD-158627 | uscsaucgAfaGfAfCfaaauugaagaL96 | 3631 | usCfsuucAfaUfUfugucUfuCfgaugascsa |
| AD-159182 | gscsagauUfuGfGfCfagagaguauaL96 | 3632 | usAfsuacUfcUfCfugccAfaAfucugcsusa |
| AD-159702 | csusccuuCfaCfUfGfaacaugccuaL96 | 3633 | usAfsggcAfuGfUfucagUfgAfaggagscsc |
| AD-159715 | csasugccUfaGfUfCfcaacauuuuuL96 | 3634 | asAfsaaaUfgUfUfggacUfaGfgcaugsusu |
| AD-158575 | usgsccauCfaGfUfAfucuuaaugaaL96 | 3635 | usUfscauUfaAfGfauacUfgAfuggcascsa |
| AD-158576 | gscscaucAfgUfAfUfcuuaaugaaaL96 | 3636 | usUfsucaUfuAfAfgauaCfuGfauggcsasc |
| AD-158684 | ususagaaCfaCfCfAfaagauugucuL96 | 3637 | asGfsacaAfuCfUfuuggUfgUfucuaasgsg |
| AD-159410 | asuscauuUfcAfCfUfgucuaggcuaL96 | 3638 | usAfsgccUfaGfAfcaguGfaAfaugausasu |
| AD-159416 | uscsacugUfcUfAfGfgcuacaacaaL96 | 3639 | usUfsguuGfuAfGfccuaGfaCfagugasasa |
| AD-159738 | gsgsauccAfgUfGfUfauaaauccaaL96 | 3640 | usUfsggaUfuUfAfuacaCfuGfgauccscsa |
| AD-159857 | csasacuaUfcCfAfAfguguuauacaL96 | 3641 | usGfsuauAfaCfAfcuugGfaUfaguugsgsu |
| AD-158497 | ususgguuCfcAfAfGfuccaauaugaL96 | 3642 | usCfsauaUfuGfGfacuuGfgAfaccaasasa |
| AD-159124 | usgscuuaUfgAfGfGfugaucaaacuL96 | 3643 | asGfsuuuGfaUfCfaccuCfaUfaagcascsu |
| AD-159140 | asasacucAfaAfGfGfcuacacaucaL96 | 3644 | usGfsaugUfgUfAfgccuUfuGfaguuusgsa |
| AD-159312 | uscsucagAfcCfUfUfgugaaggugaL96 | 3645 | usCfsaccUfuCfAfcaagGfuCfugagasusu |
| AD-159552 | usasaaauCfcAfCfAfgcuauauccuL96 | 3646 | asGfsgauAfuAfGfcuguGfgAfuuuuascsa |
| AD-159704 | cscsuucaCfuGfAfAfcaugccuaguL96 | 3647 | asCfsuagGfcAfUfguucAfgUfgaaggsasg |
| AD-159737 | gsgsgaucCfaGfUfGfuauaaauccaL96 | 3648 | usGfsgauUfuAfUfacacUfgGfaucccsasg |
| AD-159869 | csasauaaAfcCfUfUfgaacagugaaL96 | 3649 | usUfscacUfgUfUfcaagGfuUfuauugsgsg |
| AD-158570 | gsgsccugUfgCfCfAfucaguaucuuL96 | 3650 | asAfsgauAfcUfGfauggCfaCfaggccsasu |
| AD-158618 | ususguugAfuGfUfCfaucgaagacaL96 | 3651 | usGfsucuUfcGfAfugacAfuCfaacaasgsa |
| AD-159788 | gsgsaucuUfaUfUfUfugugaacuauL96 | 3652 | asUfsaguUfcAfCfaaaaUfaAfgauccsusu |
| AD-159786 | asasggauCfuUfAfUfuuugugaacuL96 | 3653 | asGfsuucAfcAfAfaauaAfgAfuccuususg |
| AD-159760 | asuscaugUfcUfUfGfugcauaauuaL96 | 3654 | usAfsauuAfuGfCfacaaGfaCfaugausasu |
| AD-159404 | usgsucauAfuCfAfUfuucacugucuL96 | 3655 | asGfsacaGfuGfAfaaugAfuAfugacasusc |
| AD-159406 | uscsauauCfaUfUfUfcacugucuaaL96 | 3656 | usUfsagaCfaGfUfgaaaUfgAfuaugascsa |
| AD-158536 | asusuuauAfaUfCfUfucuaaaggaaL96 | 3657 | usUfsccuUfuAfGfaagaUfuAfuaaauscsa |
| AD-159545 | usgsguuuGfuAfAfAfauccacagcuL96 | 3658 | asGfscugUfgGfAfuuuuAfcAfaaccasusu |
| AD-159574 | asusgcugGfaUfGfGfuauuaaucuuL96 | 3659 | asAfsgauUfaAfUfaccaUfcCfagcauscsa |
| AD-159802 | asascuauAfuCfAfGfuaguguacauL96 | 3660 | asUfsguaCfaCfUfacugAfuAfuaguuscsa |
| AD-159518 | asuscaacUfcCfUfGfaaguuagaaaL96 | 3661 | usUfsucuAfaCfUfucagGfaGfuugausgsu |
| AD-159577 | csusggauGfgUfAfUfuaaucuuguaL96 | 3662 | usAfscaaGfaUfUfaauaCfcAfuccagscsa |
| AD-159409 | usasucauUfuCfAfCfugucuaggcuL96 | 3663 | asGfsccuAfgAfCfagugAfaAfugauasusg |
| AD-159551 | gsusaaaaUfcCfAfCfagcuauaucaL96 | 3664 | usGfsauaUfaGfCfugugGfaUfuuuacsasa |
| AD-159276 | uscscuuaGfuGfUfUfccuugcauuuL96 | 3665 | asAfsaugCfaAfGfgaacAfcUfaaggasasg |
| AD-159407 | csasuaucAfuUfUfCfacugucuagaL96 | 3666 | usCfsuagAfcAfGfugaaAfuGfauaugsasc |
| AD-159515 | asascaucAfaCfUfCfcugaaguuaaL96 | 3667 | usUfsaacUfuCfAfggagUfuGfauguususu |
| AD-159570 | cscsugauGfcUfGfGfaugguauuaaL96 | 3668 | usUfsaauAfcCfAfuccaGfcAfucaggsasu |
| AD-159849 | asasugcaAfcCfAfAfcuauccaaguL96 | 3669 | asCfsuugGfaUfAfguugGfuUfgcauusgsu |
| AD-159252 | ususuacgGfaAfUfAfaaggaugauaL96 | 3670 | usAfsucaUfcCfUfuuauUfcCfguaaasgsa |
| AD-159275 | ususccuuAfgUfGfUfuccuugcauuL96 | 3671 | asAfsugcAfaGfGfaacaCfuAfaggaasgsa |
| AD-159848 | csasaugcAfaCfCfAfacuauccaaaL96 | 3672 | usUfsuggAfuAfGfuuggUfuGfcauugsusu |
| AD-159184 | asgsauuuGfgCfAfGfagaguauaauL96 | 3673 | asUfsuauAfcUfCfucugCfcAfaaucusgsc |
| AD-159231 | ususuccaCfcAfUfGfauuaaggguaL96 | 3674 | usAfscccUfuAfAfucauGfgUfggaaascsu |
| AD-159607 | ascsugguUfaGfUfGfugaaauaguuL96 | 3675 | asAfscuaUfuUfCfacacUfaAfccagususg |
| AD-158504 | csasagucCfaAfUfAfuggcaacucuL96 | 3676 | asGfsaguUfgCfCfauauUfgGfacuugsgsa |
| AD-159233 | uscscaccAfuGfAfUfuaagggucuuL96 | 3677 | asAfsgacCfcUfUfaaucAfuGfguggasasa |
| AD-159411 | uscsauuuCfaCfUfGfucuaggcuaaL96 | 3678 | usUfsagcCfuAfGfacagUfgAfaaugasusa |
| AD-159462 | usgsuccuUfuUfUfAfucugaucuguL96 | 3679 | asCfsagaUfcAfGfauaaAfaAfggacasasc |
| AD-159742 | cscsagugUfaUfAfAfauccaauauaL96 | 3680 | usAfsuauUfgGfAfuuuaUfaCfacuggsasu |
| AD-159863 | uscscaagUfgUfUfAfuaccaacuaaL96 | 3681 | usUfsaguUfgGfUfauaaCfaCfuuggasusa |
| AD-158687 | gsasacacCfaAfAfGfauugucucuaL96 | 3682 | usAfsgagAfcAfAfucuuUfgGfuguucsusa |
| AD-158688 | asascaccAfaAfGfAfuugucucugaL96 | 3683 | usCfsagaGfaCfAfaucuUfuGfguguuscsu |
| AD-159458 | asusguugUfcCfUfUfuuuaucugauL96 | 3684 | asUfscagAfuAfAfaaagGfaCfaacausgsc |
| AD-159519 | uscsaacuCfcUfGfAfaguuagaaauL96 | 3685 | asUfsuucUfaAfCfuucaGfgAfguugasusg |
| AD-159858 | asascuauCfcAfAfGfuguuauaccaL96 | 3686 | usGfsguaUfaAfCfacuuGfgAfuaguusgsg |
| AD-159583 | gsgsuauuAfaUfCfUfuguguagucuL96 | 3687 | asGfsacuAfcAfCfaagaUfuAfauaccsasu |
| AD-159700 | gsgscuccUfuCfAfCfugaacaugcaL96 | 3688 | usGfscauGfuUfCfagugAfaGfgagccsasg |
| AD-159807 | usasucagUfaGfUfGfuacauuaccaL96 | 3689 | usGfsguaAfuGfUfacacUfaCfugauasusa |
| AD-158673 | csasgccuUfuUfCfCfuuagaacacaL96 | 3690 | usGfsuguUfcUfAfaggaAfaAfggcugscsc |
| AD-159608 | csusgguuAfgUfGfUfgaaauaguuaL96 | 3691 | usAfsacuAfuUfUfcacaCfuAfaccagsusu |
| AD-159803 | ascsuauaUfcAfGfUfaguguacauuL96 | 3692 | asAfsuguAfcAfCfuacuGfaUfauagususc |
| AD-159805 | usasuaucAfgUfAfGfuguacauuaaL96 | 3693 | usUfsaauGfuAfCfacuaCfuGfauauasgsu |
| AD-159489 | gsusaauaUfuUfUfAfagauggacuaL96 | 3694 | usAfsgucCfaUfCfuuaaAfaUfauuacsusg |
| AD-159495 | ususuuaaGfaUfGfGfacugggaaaaL96 | 3695 | usUfsuucCfcAfGfuccaUfcUfuaaaasusa |
| AD-159706 | ususcacuGfaAfCfAfugccuagucaL96 | 3696 | usGfsacuAfgGfCfauguUfcAfgugaasgsg |
| AD-159855 | ascscaacUfaUfCfCfaaguguuauaL96 | 3697 | usAfsuaaCfaCfUfuggaUfaGfuuggususg |
| AD-159864 | cscsaaguGfuUfAfUfaccaacuaaaL96 | 3698 | usUfsuagUfuGfGfuauaAfcAfcuuggsasu |
| AD-159488 | asgsuaauAfuUfUfUfaagauggacuL96 | 3699 | asGfsuccAfuCfUfuaaaAfuAfuuacusgsc |
| AD-159553 | asasaaucCfaCfAfGfcuauauccuaL96 | 3700 | usAfsggaUfaUfAfgcugUfgGfauuuusasc |
| AD-159703 | uscscuucAfcUfGfAfacaugccuaaL96 | 3701 | usUfsaggCfaUfGfuucaGfuGfaaggasgsc |
| AD-159708 | csascugaAfcAfUfGfccuaguccaaL96 | 3702 | usUfsggaCfuAfGfgcauGfuUfcagugsasa |
| AD-159866 | asasguguUfaUfAfCfcaacuaaaacL96 | 3703 | gsUfsuuuAfgUfUfgguaUfaAfcacuusgsg |
| AD-159232 | ususccacCfaUfGfAfuuaagggucuL96 | 3704 | asGfsaccCfuUfAfaucaUfgGfuggaasasc |
| AD-159712 | gsasacauGfcCfUfAfguccaacauuL96 | 3705 | asAfsuguUfgGfAfcuagGfcAfuguucsasg |
| AD-159808 | asuscaguAfgUfGfUfacauuaccauL96 | 3706 | asUfsgguAfaUfGfuacaCfuAfcugausasu |
| AD-159862 | asusccaaGfuGfUfUfauaccaacuaL96 | 3707 | usAfsguuGfgUfAfuaacAfcUfuggausasg |
| AD-158503 | cscsaaguCfcAfAfUfauggcaacuaL96 | 3708 | usAfsguuGfcCfAfuauuGfgAfcuuggsasa |
| AD-159412 | csasuuucAfcUfGfUfcuaggcuacaL96 | 3709 | usGfsuagCfcUfAfgacaGfuGfaaaugsasu |
| AD-159558 | cscsacagCfuAfUfAfuccugaugcuL96 | 3710 | asGfscauCfaGfGfauauAfgCfuguggsasu |
| AD-159705 | csusucacUfgAfAfCfaugccuaguaL96 | 3711 | usAfscuaGfgCfAfuguuCfaGfugaagsgsa |
| AD-159113 | gsusgguuGfaGfAfGfugcuuaugaaL96 | 3712 | usUfscauAfaGfCfacucUfcAfaccacscsu |
| AD-159806 | asusaucaGfuAfGfUfguacauuacaL96 | 3713 | usGfsuaaUfgUfAfcacuAfcUfgauausasg |
| AD-159853 | csasaccaAfcUfAfUfccaaguguuaL96 | 3714 | usAfsacaCfuUfGfgauaGfuUfgguugscsa |
| AD-159182 | gscsagauUfuGfGfCfagagaguauaL96 | 3715 | usAfsuacUfcUfCfugccAfaAfucugcsusa |
| AD-159702 | csusccuuCfaCfUfGfaacaugccuaL96 | 3716 | usAfsggcAfuGfUfucagUfgAfaggagscsc |
| AD-159715 | csasugccUfaGfUfCfcaacauuuuuL96 | 3717 | asAfsaaaUfgUfUfggacUfaGfgcaugsusu |
| AD-158575 | usgsccauCfaGfUfAfucuuaaugaaL96 | 3718 | usUfscauUfaAfGfauacUfgAfuggcascsa |
| AD-158576 | gscscaucAfgUfAfUfcuuaaugaaaL96 | 3719 | usUfsucaUfuAfAfgauaCfuGfauggcsasc |
| AD-158684 | ususagaaCfaCfCfAfaagauugucuL96 | 3720 | asGfsacaAfuCfUfuuggUfgUfucuaasgsg |
| AD-159410 | asuscauuUfcAfCfUfgucuaggcuaL96 | 3721 | usAfsgccUfaGfAfcaguGfaAfaugausasu |
| AD-159416 | uscsacugUfcUfAfGfgcuacaacaaL96 | 3722 | usUfsguuGfuAfGfccuaGfaCfagugasasa |
| AD-159857 | csasacuaUfcCfAfAfguguuauacaL96 | 3723 | usGfsuauAfaCfAfcuugGfaUfaguugsgsu |
| AD-158497 | ususgguuCfcAfAfGfuccaauaugaL96 | 3724 | usCfsauaUfuGfGfacuuGfgAfaccaasasa |
| AD-159124 | usgscuuaUfgAfGfGfugaucaaacuL96 | 3725 | asGfsuuuGfaUfCfaccuCfaUfaagcascsu |
| AD-159312 | uscsucagAfcCfUfUfgugaaggugaL96 | 3726 | usCfsaccUfuCfAfcaagGfuCfugagasusu |
| AD-159552 | usasaaauCfcAfCfAfgcuauauccuL96 | 3727 | asGfsgauAfuAfGfcuguGfgAfuuuuascsa |
| AD-159704 | cscsuucaCfuGfAfAfcaugccuaguL96 | 3728 | asCfsuagGfcAfUfguucAfgUfgaaggsasg |
| AD-159737 | gsgsgaucCfaGfUfGfuauaaauccaL96 | 3729 | usGfsgauUfuAfUfacacUfgGfaucccsasg |
| AD-159869 | csasauaaAfcCfUfUfgaacagugaaL96 | 3730 | usUfscacUfgUfUfcaagGfuUfuauugsgsg |
| AD-158570 | gsgsccugUfgCfCfAfucaguaucuuL96 | 3731 | asAfsgauAfcUfGfauggCfaCfaggccsasu |
| AD-158618 | ususguugAfuGfUfCfaucgaagacaL96 | 3732 | usGfsucuUfcGfAfugacAfuCfaacaasgsa |
| AD-159184 | asgsauuuGfgCfAfGfagaguauaauL96 | 3733 | asUfsuauAfcUfCfucugCfcAfaaucusgsc |
| AD-159231 | ususuccaCfcAfUfGfauuaaggguaL96 | 3734 | usAfscccUfuAfAfucauGfgUfggaaascsu |
| AD-159423 | csusaggcUfaCfAfAfcaggauucuaL96 | 3735 | usAfsgaaUfcCfUfguugUfaGfccuagsasc |
| AD-159446 | usgsgaggUfuGfUfGfcauguugucaL96 | 3736 | usGfsacaAfcAfUfgcacAfaCfcuccascsc |
| AD-159701 | gscsuccuUfcAfCfUfgaacaugccuL96 | 3737 | asGfsgcaUfgUfUfcaguGfaAfggagcscsa |
| AD-158494 | csusuuugGfuUfCfCfaaguccaauaL96 | 3738 | usAfsuugGfaCfUfuggaAfcCfaaaagsgsa |
| AD-158571 | gscscuguGfcCfAfUfcaguaucuuaL96 | 3739 | usAfsagaUfaCfUfgaugGfcAfcaggcscsa |
| AD-159125 | gscsuuauGfaGfGfUfgaucaaacuaL96 | 3740 | usAfsguuUfgAfUfcaccUfcAfuaagcsasc |
| AD-159126 | csusuaugAfgGfUfGfaucaaacucaL96 | 3741 | usGfsaguUfuGfAfucacCfuCfauaagscsa |
| AD-159287 | cscsuugcAfuUfUfUfgggacagaauL96 | 3742 | asUfsucuGfuCfCfcaaaAfuGfcaaggsasa |
| AD-158499 | gsgsuuccAfaGfUfCfcaauauggcaL96 | 3743 | usGfsccaUfaUfUfggacUfuGfgaaccsasa |
| AD-159417 | csascuguCfuAfGfGfcuacaacagaL96 | 3744 | usCfsuguUfgUfAfgccuAfgAfcagugsasa |
| AD-159418 | ascsugucUfaGfGfCfuacaacaggaL96 | 3745 | usCfscugUfuGfUfagccUfaGfacagusgsa |
| AD-158550 | asasuaagAfuUfAfCfaguuguuggaL96 | 3746 | usCfscaaCfaAfCfuguaAfuCfuuauuscsu |
| AD-159116 | gsusugagAfgUfGfCfuuaugagguaL96 | 3747 | usAfsccuCfaUfAfagcaCfuCfucaacscsa |
| AD-159421 | gsuscuagGfcUfAfCfaacaggauuaL96 | 3748 | usAfsaucCfuGfUfuguaGfcCfuagacsasg |
| AD-159422 | uscsuaggCfuAfCfAfacaggauucuL96 | 3749 | asGfsaauCfcUfGfuuguAfgCfcuagascsa |
| AD-159445 | gsusggagGfuUfGfUfgcauguuguaL96 | 3750 | usAfscaaCfaUfGfcacaAfcCfuccacscsu |
| AD-159130 | usgsagguGfaUfCfAfaacucaaagaL96 | 3751 | usCfsuuuGfaGfUfuugaUfcAfccucasusa |
| AD-159134 | gsusgaucAfaAfCfUfcaaaggcuaaL96 | 3752 | usUfsagcCfuUfUfgaguUfuGfaucacscsu |
| AD-159343 | usgsaggaAfgAfGfGfcccguuugaaL96 | 3753 | usUfscaaAfcGfGfgccuCfuUfccucasgsa |
| AD-159105 | ascsaagcAfgGfUfGfguugagaguaL96 | 3754 | usAfscucUfcAfAfccacCfuGfcuugusgsa |
| AD-159183 | csasgauuUfgGfCfAfgagaguauaaL96 | 3755 | usUfsauaCfuCfUfcugcCfaAfaucugscsu |
| AD-159123 | gsusgcuuAfuGfAfGfgugaucaaacL96 | 3756 | gsUfsuugAfuCfAfccucAfuAfagcacsusc |
| AD-159181 | asgscagaUfuUfGfGfcagagaguauL96 | 3757 | asUfsacuCfuCfUfgccaAfaUfcugcusasc |
| AD-159186 | asusuuggCfaGfAfGfaguauaaugaL96 | 3758 | usCfsauuAfuAfCfucucUfgCfcaaauscsu |
| AD-159187 | ususuggcAfgAfGfAfguauaaugaaL96 | 3759 | usUfscauUfaUfAfcucuCfuGfccaaasusc |
| AD-159288 | csusugcaUfuUfUfGfggacagaauaL96 | 3760 | usAfsuucUfgUfCfccaaAfaUfgcaagsgsa |
| AD-159306 | asusggaaUfcUfCfAfgaccuugugaL96 | 3761 | usCfsacaAfgGfUfcugaGfaUfuccaususc |
| AD-159559 | csascagcUfaUfAfUfccugaugcuaL96 | 3762 | usAfsgcaUfcAfGfgauaUfaGfcugugsgsa |
| AD-159344 | gsasggaaGfaGfGfCfccguuugaaaL96 | 3763 | usUfsucaAfaCfGfggccUfcUfuccucsasg |
| AD-159341 | uscsugagGfaAfGfAfggcccguuuaL96 | 3764 | usAfsaacGfgGfCfcucuUfcCfucagasasg |
| AD-159729 | csascaucCfuGfGfGfauccaguguaL96 | 3765 | usAfscacUfgGfAfucccAfgGfaugugsasc |
| AD-158674 | asgsccuuUfuCfCfUfuagaacaccaL96 | 3766 | usGfsgugUfuCfUfaaggAfaAfaggcusgsc |
| AD-159604 | uscsaacuGfgUfUfAfgugugaaauaL96 | 3767 | usAfsuuuCfaCfAfcuaaCfcAfguugasasg |

| Duplex | | | |
|---|---|---|---|
| Name | SEQ ID NO | mRNA target sequence | SEQ ID NO |
| AD-159469 | 3768 | UUUUUAUCUGAUCUGUGAUUAAA | 3954 |
| AD-159607 | 3769 | CAACUGGUUAGUGUGAAAUAGUU | 3955 |
| AD-159713 | 3770 | UGAACAUGCCUAGUCCAACAUUU | 3956 |
| AD-158504 | 3771 | UCCAAGUCCAAUAUGGCAACUCU | 3957 |
| AD-159233 | 3772 | UUUCCACCAUGAUUAAGGGUCUU | 3958 |
| AD-159411 | 3773 | UAUCAUUUCACUGUCUAGGCUAC | 3959 |
| AD-159462 | 3774 | GUUGUCCUUUUUAUCUGAUCUGU | 3960 |
| AD-159742 | 3775 | AUCCAGUGUAUAAAUCCAAUAUC | 3961 |
| AD-159863 | 3776 | UAUCCAAGUGUUAUACCAACUAA | 3962 |
| AD-158626 | 3777 | AUGUCAUCGAAGACAAAUUGAAG | 3963 |
| AD-158687 | 3778 | UAGAACACCAAAGAUUGUCUCUG | 3964 |
| AD-158688 | 3779 | AGAACACCAAAGAUUGUCUCUGG | 3965 |
| AD-159458 | 3780 | GCAUGUUGUCCUUUUUAUCUGAU | 3966 |
| AD-159519 | 3781 | CAUCAACUCCUGAAGUUAGAAAU | 3967 |
| AD-159858 | 3782 | CCAACUAUCCAAGUGUUAUACCA | 3968 |
| AD-158681 | 3783 | UUUCCUUAGAACACCAAAGAUUG | 3969 |
| AD-159583 | 3784 | AUGGUAUUAAUCUUGUGUAGUCU | 3970 |
| AD-159700 | 3785 | CUGGCUCCUUCACUGAACAUGCC | 3971 |
| AD-159807 | 3786 | UAUAUCAGUAGUGUACAUUACCA | 3972 |
| AD-158673 | 3787 | GGCAGCCUUUUCCUUAGAACACC | 3973 |
| AD-159608 | 3788 | AACUGGUUAGUGUGAAAUAGUUC | 3974 |
| AD-159803 | 3789 | GAACUAUAUCAGUAGUGUACAUU | 3975 |
| AD-159805 | 3790 | ACUAUAUCAGUAGUGUACAUUAC | 3976 |
| AD-159489 | 3791 | CAGUAAUAUUUUAAGAUGGACUG | 3977 |
| AD-159495 | 3792 | UAUUUUAAGAUGGACUGGGAAAA | 3978 |
| AD-159609 | 3793 | ACUGGUUAGUGUGAAAUAGUUCU | 3979 |
| AD-159706 | 3794 | CCUUCACUGAACAUGCCUAGUCC | 3980 |
| AD-159855 | 3795 | CAACCAACUAUCCAAGUGUUAUA | 3981 |
| AD-159864 | 3796 | AUCCAAGUGUUAUACCAACUAAA | 3982 |
| AD-158491 | 3797 | GAUUCCUUUUGGUUCCAAGUCCA | 3983 |
| AD-158672 | 3798 | UGGCAGCCUUUUCCUUAGAACAC | 3984 |
| AD-159488 | 3799 | GCAGUAAUAUUUUAAGAUGGACU | 3985 |
| AD-159553 | 3800 | GUAAAAUCCACAGCUAUAUCCUG | 3986 |
| AD-159703 | 3801 | GCUCCUUCACUGAACAUGCCUAG | 3987 |
| AD-159708 | 3802 | UUCACUGAACAUGCCUAGUCCAA | 3988 |
| AD-159866 | 3803 | CCAAGUGUUAUACCAACUAAAAC | 3989 |
| AD-159232 | 3804 | GUUUCCACCAUGAUUAAGGGUCU | 3990 |
| AD-159712 | 3805 | CUGAACAUGCCUAGUCCAACAUU | 3991 |
| AD-159808 | 3806 | AUAUCAGUAGUGUACAUUACCAU | 3992 |
| AD-159862 | 3807 | CUAUCCAAGUGUUAUACCAACUA | 3993 |
| AD-158503 | 3808 | UUCCAAGUCCAAUAUGGCAACUC | 3994 |
| AD-159311 | 3809 | GAAUCUCAGACCUUGUGAAGGUG | 3995 |
| AD-159412 | 3810 | AUCAUUUCACUGUCUAGGCUACA | 3996 |
| AD-159558 | 3811 | AUCCACAGCUAUAUCCUGAUGCU | 3997 |
| AD-159705 | 3812 | UCCUUCACUGAACAUGCCUAGUC | 3998 |
| AD-159113 | 3813 | AGGUGGUUGAGAGUGCUUAUGAG | 3999 |
| AD-159139 | 3814 | AUCAAACUCAAAGGCUACACAUC | 4000 |
| AD-159806 | 3815 | CUAUAUCAGUAGUGUACAUUACC | 4001 |
| AD-159853 | 3816 | UGCAACCAACUAUCCAAGUGUUA | 4002 |
| AD-158627 | 3817 | UGUCAUCGAAGACAAAUUGAAGG | 4003 |
| AD-159182 | 3818 | UAGCAGAUUUGGCAGAGAGUAUA | 4004 |
| AD-159702 | 3819 | GGCUCCUUCACUGAACAUGCCUA | 4005 |
| AD-159715 | 3820 | AACAUGCCUAGUCCAACAUUUUU | 4006 |
| AD-158575 | 3821 | UGUGCCAUCAGUAUCUUAAUGAA | 4007 |
| AD-158576 | 3822 | GUGCCAUCAGUAUCUUAAUGAAG | 4008 |
| AD-158684 | 3823 | CCUUAGAACACCAAAGAUUGUCU | 4009 |
| AD-159410 | 3824 | AUAUCAUUUCACUGUCUAGGCUA | 4010 |
| AD-159416 | 3825 | UUUCACUGUCUAGGCUACAACAG | 4011 |
| AD-159738 | 3826 | UGGGAUCCAGUGUAUAAAUCCAA | 4012 |
| AD-159857 | 3827 | ACCAACUAUCCAAGUGUUAUACC | 4013 |
| AD-158497 | 3828 | UUUUGGUUCCAAGUCCAAUAUGG | 4014 |
| AD-159124 | 3829 | AGUGCUUAUGAGGUGAUCAAACU | 4015 |
| AD-159140 | 3830 | UCAAACUCAAAGGCUACACAUCC | 4016 |
| AD-159312 | 3831 | AAUCUCAGACCUUGUGAAGGUGA | 4017 |
| AD-159552 | 3832 | UGUAAAAUCCACAGCUAUAUCCU | 4018 |
| AD-159704 | 3833 | CUCCUUCACUGAACAUGCCUAGU | 4019 |
| AD-159737 | 3834 | CUGGGAUCCAGUGUAUAAAUCCA | 4020 |
| AD-159869 | 3835 | CCCAAUAAACCUUGAACAGUGAC | 4021 |
| AD-158570 | 3836 | AUGGCCUGUGCCAUCAGUAUCUU | 4022 |
| AD-158618 | 3837 | UCUUGUUGAUGUCAUCGAAGACA | 4023 |
| AD-159788 | 3838 | AAGGAUCUUAUUUUGUGAACUAU | 4024 |
| AD-159786 | 3839 | CAAAGGAUCUUAUUUUGUGAACU | 4025 |
| AD-159760 | 3840 | AUAUCAUGUCUUGUGCAUAAUUC | 4026 |
| AD-159404 | 3841 | GAUGUCAUAUCAUUUCACUGUCU | 4027 |
| AD-159406 | 3842 | UGUCAUAUCAUUUCACUGUCUAG | 4028 |
| AD-158536 | 3843 | UGAUUUAUAAUCUUCUAAAGGAA | 4029 |
| AD-159545 | 3844 | AAUGGUUUGUAAAAUCCACAGCU | 4030 |
| AD-159574 | 3845 | UGAUGCUGGAUGGUAUUAAUCUU | 4031 |
| AD-159802 | 3846 | UGAACUAUAUCAGUAGUGUACAU | 4032 |
| AD-159518 | 3847 | ACAUCAACUCCUGAAGUUAGAAA | 4033 |
| AD-159577 | 3848 | UGCUGGAUGGUAUUAAUCUUGUG | 4034 |
| AD-159409 | 3849 | CAUAUCAUUUCACUGUCUAGGCU | 4035 |
| AD-159551 | 3850 | UUGUAAAAUCCACAGCUAUAUCC | 4036 |
| AD-159276 | 3851 | CUUCCUUAGUGUUCCUUGCAUUU | 4037 |
| AD-159407 | 3852 | GUCAUAUCAUUUCACUGUCUAGG | 4038 |
| AD-159515 | 3853 | AAAACAUCAACUCCUGAAGUUAG | 4039 |
| AD-159570 | 3854 | AUCCUGAUGCUGGAUGGUAUUAA | 4040 |
| AD-159849 | 3855 | ACAAUGCAACCAACUAUCCAAGU | 4041 |
| AD-159252 | 3856 | UCUUUACGGAAUAAAGGAUGAUG | 4042 |
| AD-159275 | 3857 | UCUUCCUUAGUGUUCCUUGCAUU | 4043 |
| AD-159848 | 3858 | AACAAUGCAACCAACUAUCCAAG | 4044 |
| AD-159184 | 3859 | GCAGAUUUGGCAGAGAGUAUAAU | 4045 |
| AD-159231 | 3860 | AGUUUCCACCAUGAUUAAGGGUC | 4046 |
| AD-159607 | 3861 | CAACUGGUUAGUGUGAAAUAGUU | 4047 |
| AD-158504 | 3862 | UCCAAGUCCAAUAUGGCAACUCU | 4048 |
| AD-159233 | 3863 | UUUCCACCAUGAUUAAGGGUCUU | 4049 |
| AD-159411 | 3864 | UAUCAUUUCACUGUCUAGGCUAC | 4050 |
| AD-159462 | 3865 | GUUGUCCUUUUUAUCUGAUCUGU | 4051 |
| AD-159742 | 3866 | AUCCAGUGUAUAAAUCCAAUAUC | 4052 |
| AD-159863 | 3867 | UAUCCAAGUGUUAUACCAACUAA | 4053 |
| AD-158687 | 3868 | UAGAACACCAAAGAUUGUCUCUG | 4054 |
| AD-158688 | 3869 | AGAACACCAAAGAUUGUCUCUGG | 4055 |
| AD-159458 | 3870 | GCAUGUUGUCCUUUUUAUCUGAU | 4056 |
| AD-159519 | 3871 | CAUCAACUCCUGAAGUUAGAAAU | 4057 |
| AD-159858 | 3872 | CCAACUAUCCAAGUGUUAUACCA | 4058 |
| AD-159583 | 3873 | AUGGUAUUAAUCUUGUGUAGUCU | 4059 |
| AD-159700 | 3874 | CUGGCUCCUUCACUGAACAUGCC | 4060 |
| AD-159807 | 3875 | UAUAUCAGUAGUGUACAUUACCA | 4061 |
| AD-158673 | 3876 | GGCAGCCUUUUCCUUAGAACACC | 4062 |
| AD-159608 | 3877 | AACUGGUUAGUGUGAAAUAGUUC | 4063 |
| AD-159803 | 3878 | GAACUAUAUCAGUAGUGUACAUU | 4064 |
| AD-159805 | 3879 | ACUAUAUCAGUAGUGUACAUUAC | 4065 |
| AD-159489 | 3880 | CAGUAAUAUUUUAAGAUGGACUG | 4066 |
| AD-159495 | 3881 | UAUUUUAAGAUGGACUGGGAAAA | 4067 |
| AD-159706 | 3882 | CCUUCACUGAACAUGCCUAGUCC | 4068 |
| AD-159855 | 3883 | CAACCAACUAUCCAAGUGUUAUA | 4069 |
| AD-159864 | 3884 | AUCCAAGUGUUAUACCAACUAAA | 4070 |
| AD-159488 | 3885 | GCAGUAAUAUUUUAAGAUGGACU | 4071 |
| AD-159553 | 3886 | GUAAAAUCCACAGCUAUAUCCUG | 4072 |
| AD-159703 | 3887 | GCUCCUUCACUGAACAUGCCUAG | 4073 |
| AD-159708 | 3888 | UUCACUGAACAUGCCUAGUCCAA | 4074 |
| AD-159866 | 3889 | CCAAGUGUUAUACCAACUAAAAC | 4075 |
| AD-159232 | 3890 | GUUUCCACCAUGAUUAAGGGUCU | 4076 |
| AD-159712 | 3891 | CUGAACAUGCCUAGUCCAACAUU | 4077 |
| AD-159808 | 3892 | AUAUCAGUAGUGUACAUUACCAU | 4078 |
| AD-159862 | 3893 | CUAUCCAAGUGUUAUACCAACUA | 4079 |
| AD-158503 | 3894 | UUCCAAGUCCAAUAUGGCAACUC | 4080 |
| AD-159412 | 3895 | AUCAUUUCACUGUCUAGGCUACA | 4081 |
| AD-159558 | 3896 | AUCCACAGCUAUAUCCUGAUGCU | 4082 |
| AD-159705 | 3897 | UCCUUCACUGAACAUGCCUAGUC | 4083 |
| AD-159113 | 3898 | AGGUGGUUGAGAGUGCUUAUGAG | 4084 |
| AD-159806 | 3899 | CUAUAUCAGUAGUGUACAUUACC | 4085 |
| AD-159853 | 3900 | UGCAACCAACUAUCCAAGUGUUA | 4086 |
| AD-159182 | 3901 | UAGCAGAUUUGGCAGAGAGUAUA | 4087 |
| AD-159702 | 3902 | GGCUCCUUCACUGAACAUGCCUA | 4088 |
| AD-159715 | 3903 | AACAUGCCUAGUCCAACAUUUUU | 4089 |
| AD-158575 | 3904 | UGUGCCAUCAGUAUCUUAAUGAA | 4090 |
| AD-158576 | 3905 | GUGCCAUCAGUAUCUUAAUGAAG | 4091 |
| AD-158684 | 3906 | CCUUAGAACACCAAAGAUUGUCU | 4092 |
| AD-159410 | 3907 | AUAUCAUUUCACUGUCUAGGCUA | 4093 |
| AD-159416 | 3908 | UUUCACUGUCUAGGCUACAACAG | 4094 |
| AD-159857 | 3909 | ACCAACUAUCCAAGUGUUAUACC | 4095 |
| AD-158497 | 3910 | UUUUGGUUCCAAGUCCAAUAUGG | 4096 |
| AD-159124 | 3911 | AGUGCUUAUGAGGUGAUCAAACU | 4097 |
| AD-159312 | 3912 | AAUCUCAGACCUUGUGAAGGUGA | 4098 |
| AD-159552 | 3913 | UGUAAAAUCCACAGCUAUAUCCU | 4099 |
| AD-159704 | 3914 | CUCCUUCACUGAACAUGCCUAGU | 4100 |
| AD-159737 | 3915 | CUGGGAUCCAGUGUAUAAAUCCA | 4101 |
| AD-159869 | 3916 | CCCAAUAAACCUUGAACAGUGAC | 4102 |
| AD-158570 | 3917 | AUGGCCUGUGCCAUCAGUAUCUU | 4103 |
| AD-158618 | 3918 | UCUUGUUGAUGUCAUCGAAGACA | 4104 |
| AD-159184 | 3919 | GCAGAUUUGGCAGAGAGUAUAAU | 4105 |
| AD-159231 | 3920 | AGUUUCCACCAUGAUUAAGGGUC | 4106 |
| AD-159423 | 3921 | GUCUAGGCUACAACAGGAUUCUA | 4107 |
| AD-159446 | 3922 | GGUGGAGGUUGUGCAUGUUGUCC | 4108 |
| AD-159701 | 3923 | UGGCUCCUUCACUGAACAUGCCU | 4109 |
| AD-158494 | 3924 | UCCUUUUGGUUCCAAGUCCAAUA | 4110 |
| AD-158571 | 3925 | UGGCCUGUGCCAUCAGUAUCUUA | 4111 |
| AD-159125 | 3926 | GUGCUUAUGAGGUGAUCAAACUC | 4112 |
| AD-159126 | 3927 | UGCUUAUGAGGUGAUCAAACUCA | 4113 |
| AD-159287 | 3928 | UUCCUUGCAUUUUGGGACAGAAU | 4114 |
| AD-158499 | 3929 | UUGGUUCCAAGUCCAAUAUGGCA | 4115 |
| AD-159417 | 3930 | UUCACUGUCUAGGCUACAACAGG | 4116 |
| AD-159418 | 3931 | UCACUGUCUAGGCUACAACAGGA | 4117 |
| AD-158550 | 3932 | AGAAUAAGAUUACAGUUGUUGGG | 4118 |
| AD-159116 | 3933 | UGGUUGAGAGUGCUUAUGAGGUG | 4119 |
| AD-159421 | 3934 | CUGUCUAGGCUACAACAGGAUUC | 4120 |
| AD-159422 | 3935 | UGUCUAGGCUACAACAGGAUUCU | 4121 |
| AD-159445 | 3936 | AGGUGGAGGUUGUGCAUGUUGUC | 4122 |
| AD-159130 | 3937 | UAUGAGGUGAUCAAACUCAAAGG | 4123 |
| AD-159134 | 3938 | AGGUGAUCAAACUCAAAGGCUAC | 4124 |
| AD-159343 | 3939 | UCUGAGGAAGAGGCCCGUUUGAA | 4125 |
| AD-159105 | 3940 | UCACAAGCAGGUGGUUGAGAGUG | 4126 |
| AD-159183 | 3941 | AGCAGAUUUGGCAGAGAGUAUAA | 4127 |
| AD-159123 | 3942 | GAGUGCUUAUGAGGUGAUCAAAC | 4128 |
| AD-159181 | 3943 | GUAGCAGAUUUGGCAGAGAGUAU | 4129 |
| AD-159186 | 3944 | AGAUUUGGCAGAGAGUAUAAUGA | 4130 |
| AD-159187 | 3945 | GAUUUGGCAGAGAGUAUAAUGAA | 4131 |
| AD-159288 | 3946 | UCCUUGCAUUUUGGGACAGAAUG | 4132 |
| AD-159306 | 3947 | GAAUGGAAUCUCAGACCUUGUGA | 4133 |
| AD-159559 | 3948 | UCCACAGCUAUAUCCUGAUGCUG | 4134 |
| AD-159344 | 3949 | CUGAGGAAGAGGCCCGUUUGAAG | 4135 |
| AD-159341 | 3950 | CUUCUGAGGAAGAGGCCCGUUUG | 4136 |
| AD-159729 | 3951 | GUCACAUCCUGGGAUCCAGUGUA | 4137 |
| AD-158674 | 3952 | GCAGCCUUUUCCUUAGAACACCA | 4138 |
| AD-159604 | 3953 | CUUCAACUGGUUAGUGUGAAAUA | 4139 |

TABLE 6A
Single dose screen in Primary Mouse Hepatocytes

| Duplex Name | 10 nM | STDEV | 0.1 nM | STDEV |
|---|---|---|---|---|
| AD-84747 | 8.1 | 1.8 | 38.6 | 4.1 |
| AD-84748 | 58.2 | 11.9 | 77.0 | 14.5 |
| AD-84749 | 12.0 | 1.6 | 33.7 | 8.3 |
| AD-84750 | 9.9 | 1.4 | 38.1 | 9.7 |
| AD-84751 | 22.7 | 8.0 | 67.2 | 11.8 |
| AD-84752 | 23.6 | 3.5 | 54.5 | 21.7 |
| AD-84753 | 8.2 | 1.4 | 26.2 | 11.4 |
| AD-84754 | 29.7 | 7.3 | 41.7 | 2.9 |
| AD-84755 | 24.5 | 9.3 | 61.7 | 9.9 |
| AD-84756 | 5.2 | 0.8 | 32.8 | 15.6 |
| AD-84757 | 10.4 | 0.5 | 60.5 | 9.0 |
| AD-84758 | 18.7 | 5.8 | 49.9 | 20.9 |
| AD-84759 | 14.9 | 2.7 | 68.2 | 23.8 |
| AD-84760 | 39.2 | 4.8 | 53.3 | 19.5 |
| AD-84761 | 5.3 | 1.3 | 23.5 | 8.0 |
| AD-84762 | 5.4 | 1.0 | 24.4 | 2.5 |
| AD-84763 | 9.4 | 1.9 | 48.3 | 18.5 |
| AD-84764 | 9.3 | 1.5 | 46.8 | 19.3 |
| AD-84765 | 15.8 | 3.3 | 81.1 | 24.6 |
| AD-84766 | 35.6 | 5.9 | 77.6 | 36.9 |
| AD-84767 | 46.1 | 9.5 | 112.5 | 21.9 |
| AD-84768 | 14.4 | 3.2 | 73.2 | 33.0 |
| AD-84769 | 8.3 | 3.6 | 29.9 | 2.7 |
| AD-84770 | 8.1 | 3.1 | 35.0 | 4.8 |
| AD-84771 | 22.3 | 9.5 | 90.9 | 28.2 |
| AD-84772 | 11.4 | 5.4 | 56.4 | 11.3 |
| AD-84773 | 35.6 | 16.7 | 104.8 | 20.3 |
| AD-84774 | 40.5 | 16.0 | 98.4 | 35.0 |
| AD-84775 | 16.0 | 6.2 | 66.6 | 17.2 |
| AD-84776 | 26.6 | 13.9 | 82.9 | 26.3 |
| AD-84777 | 18.1 | 1.7 | 54.2 | 14.7 |
| AD-84778 | 21.9 | 7.2 | 92.5 | 30.9 |
| AD-84779 | 31.9 | 8.6 | 99.5 | 39.5 |
| AD-84780 | 15.4 | 2.7 | 53.8 | 35.9 |
| AD-84781 | 13.2 | 2.4 | 61.8 | 2.7 |
| AD-84782 | 14.4 | 4.1 | 67.9 | 33.3 |
| AD-84783 | 20.8 | 5.5 | 89.0 | 31.1 |
| AD-84784 | 15.6 | 3.0 | 50.3 | 19.4 |
| AD-84785 | 12.3 | 12.3 | 23.5 | 23.5 |
| AD-84786 | 4.7 | 4.7 | 35.3 | 35.3 |
| AD-84787 | 12.4 | 12.4 | 45.5 | 45.5 |
| AD-84788 | 2.3 | 2.3 | 7.8 | 7.8 |
| AD-84789 | 9.4 | 9.4 | 45.7 | 45.7 |
| AD-84790 | 2.5 | 2.5 | 12.8 | 12.8 |

TABLE 6B
Single dose screen in Hep3b

| | % of Human | |
|---|---|---|
| Duplex | Message | |
| Name | Remaining | STDEV |
| AD-159469 | 16.97 | 6.86 |
| AD-159607 | 25.01 | 8.34 |
| AD-159713 | 25.91 | 11.30 |
| AD-158504 | 21.90 | 8.34 |
| AD-159233 | 25.16 | 10.01 |
| AD-159411 | 22.65 | 8.86 |
| AD-159462 | 31.26 | 10.89 |
| AD-159742 | 26.31 | 4.08 |
| AD-159863 | 22.44 | 5.86 |
| AD-158626 | 11.06 | 9.33 |
| AD-158687 | 17.11 | 9.55 |
| AD-158688 | 16.22 | 11.59 |
| AD-159458 | 16.59 | 9.47 |
| AD-159519 | 16.60 | 2.85 |
| AD-159858 | 31.03 | 12.43 |
| AD-158681 | 12.52 | 5.04 |
| AD-159583 | 30.63 | 8.04 |
| AD-159700 | 60.23 | 11.10 |
| AD-159807 | 12.17 | 4.73 |
| AD-158673 | 7.41 | 0.92 |
| AD-159608 | 19.93 | 9.83 |
| AD-159803 | 29.79 | 8.75 |
| AD-159805 | 31.27 | 12.09 |
| AD-159489 | 50.07 | 7.60 |
| AD-159495 | 22.72 | 2.15 |
| AD-159609 | 17.39 | 9.56 |
| AD-159706 | 25.44 | 3.75 |
| AD-159855 | 16.67 | 12.67 |
| AD-159864 | 8.09 | 1.09 |
| AD-158491 | 29.16 | 14.26 |
| AD-158672 | 29.36 | 10.12 |
| AD-159488 | 31.40 | 6.20 |
| AD-159553 | 24.36 | 7.63 |
| AD-159703 | 16.04 | 4.80 |
| AD-159708 | 100.96 | 26.91 |
| AD-159866 | 26.91 | 5.95 |
| AD-159232 | 21.82 | 8.62 |
| AD-159712 | 30.31 | 3.10 |
| AD-159808 | 47.72 | 11.27 |
| AD-159862 | 18.26 | 6.31 |
| AD-158503 | 32.70 | 7.50 |
| AD-159311 | 18.45 | 3.39 |
| AD-159412 | 24.28 | 10.07 |
| AD-159558 | 34.02 | 4.51 |
| AD-159705 | 28.29 | 4.65 |
| AD-159113 | 17.03 | 7.27 |
| AD-159139 | 33.24 | 8.38 |
| AD-159806 | 25.80 | 17.42 |
| AD-159853 | 28.52 | 3.85 |
| AD-158627 | 35.28 | 9.47 |
| AD-159182 | 29.66 | 7.88 |
| AD-159702 | 37.01 | 11.07 |
| AD-159715 | 22.32 | 6.78 |
| AD-158575 | 18.91 | 11.44 |
| AD-158576 | 37.74 | 18.73 |
| AD-158684 | 15.69 | 9.50 |
| AD-159410 | 30.98 | 3.65 |
| AD-159416 | 42.29 | 20.80 |
| AD-159738 | 20.66 | 2.83 |
| AD-159857 | 28.70 | 8.69 |
| AD-158497 | 22.79 | 4.43 |
| AD-159124 | 16.84 | 7.19 |
| AD-159140 | 30.90 | 7.50 |
| AD-159312 | 70.66 | 21.57 |
| AD-159552 | 29.86 | 7.83 |
| AD-159704 | 44.45 | 7.57 |
| AD-159737 | 29.05 | 8.48 |
| AD-159869 | 28.46 | 9.39 |
| AD-158570 | 31.18 | 7.43 |
| AD-158618 | 27.03 | 8.54 |
| AD-159788 | 19.87 | 9.21 |
| AD-159786 | 31.83 | 27.17 |
| AD-159760 | 32.68 | 18.79 |
| AD-159404 | 47.91 | 22.88 |
| AD-159406 | 23.84 | 10.41 |
| AD-158536 | 30.88 | 20.74 |
| AD-159545 | 84.72 | 26.81 |
| AD-159574 | 29.96 | 20.03 |
| AD-159802 | 24.57 | 9.29 |
| AD-159518 | 29.06 | 16.06 |
| AD-159577 | 34.39 | 12.83 |
| AD-159409 | 50.02 | 25.26 |
| AD-159551 | 33.79 | 11.99 |
| AD-159276 | 40.09 | 13.96 |
| AD-159407 | 37.47 | 9.59 |
| AD-159515 | 41.82 | 19.54 |
| AD-159570 | 12.41 | 3.87 |
| AD-159849 | 25.67 | 14.76 |
| AD-159252 | 14.25 | 4.14 |
| AD-159275 | 22.30 | 13.03 |
| AD-159848 | 34.58 | 13.52 |
| AD-159184 | 30.50 | 8.60 |
| AD-159231 | 103.27 | 9.11 |
| AD-159607 | 16.73 | 1.97 |
| AD-158504 | 11.46 | 1.78 |
| AD-159233 | 15.90 | 3.55 |
| AD-159411 | 9.04 | 1.84 |
| AD-159462 | 16.08 | 7.18 |
| AD-159742 | 10.92 | 3.23 |
| AD-159863 | 8.82 | 2.51 |
| AD-158687 | 14.93 | 6.23 |
| AD-158688 | 15.77 | 5.03 |
| AD-159458 | 14.85 | 9.10 |
| AD-159519 | 20.25 | 9.24 |
| AD-159858 | 22.20 | 14.11 |
| AD-159583 | 20.01 | 1.53 |
| AD-159700 | 56.12 | 12.02 |
| AD-159807 | 16.73 | 7.03 |
| AD-158673 | 6.01 | 2.09 |
| AD-159608 | 13.52 | 6.68 |
| AD-159803 | 30.47 | 10.26 |
| AD-159805 | 10.28 | 1.16 |
| AD-159489 | 24.20 | 2.91 |
| AD-159495 | 22.32 | 13.94 |
| AD-159706 | 30.61 | 17.66 |
| AD-159855 | 9.32 | 1.46 |
| AD-159864 | 10.64 | 2.41 |
| AD-159488 | 19.16 | 6.42 |
| AD-159553 | 21.69 | 13.77 |
| AD-159703 | 12.05 | 1.69 |
| AD-159708 | 68.53 | 3.86 |
| AD-159866 | 32.03 | 21.42 |
| AD-159232 | 11.99 | 1.77 |
| AD-159712 | 37.95 | 11.97 |
| AD-159808 | 15.66 | 5.30 |
| AD-159862 | 14.03 | 6.78 |
| AD-158503 | 38.82 | 12.61 |
| AD-159412 | 34.58 | 22.60 |
| AD-159558 | 44.20 | 9.58 |
| AD-159705 | 29.96 | 11.90 |
| AD-159113 | 9.61 | 0.94 |
| AD-159806 | 11.45 | 1.10 |
| AD-159853 | 18.04 | 5.87 |
| AD-159182 | 11.32 | 2.80 |
| AD-159702 | 16.90 | 2.27 |
| AD-159715 | 18.48 | 10.27 |
| AD-158575 | 12.02 | 1.74 |
| AD-158576 | 20.78 | 6.11 |
| AD-158684 | 11.37 | 7.57 |
| AD-159410 | 29.86 | 7.02 |
| AD-159416 | 46.73 | 11.03 |
| AD-159857 | 24.36 | 5.16 |
| AD-158497 | 30.17 | 3.74 |
| AD-159124 | 25.97 | 4.90 |
| AD-159312 | 70.74 | 5.44 |
| AD-159552 | 41.03 | 6.19 |
| AD-159704 | 35.64 | 15.41 |
| AD-159737 | 20.64 | 4.47 |
| AD-159869 | 32.80 | 5.77 |
| AD-158570 | 30.61 | 6.04 |
| AD-158618 | 23.25 | 8.74 |
| AD-159184 | 25.44 | 9.61 |
| AD-159231 | 84.40 | 6.16 |
| AD-159423 | 14.14 | 2.24 |
| AD-159446 | 24.93 | 8.57 |
| AD-159701 | 50.20 | 3.80 |
| AD-158494 | 11.88 | 2.84 |
| AD-158571 | 46.81 | 7.47 |
| AD-159125 | 15.81 | 2.66 |
| AD-159126 | 29.28 | 8.63 |
| AD-159287 | 25.25 | 2.91 |
| AD-158499 | 29.76 | 5.51 |
| AD-159417 | 32.69 | 6.45 |
| AD-159418 | 24.84 | 7.31 |
| AD-158550 | 28.87 | 4.53 |
| AD-159116 | 26.12 | 2.58 |
| AD-159421 | 22.32 | 3.28 |
| AD-159422 | 24.24 | 7.34 |
| AD-159445 | 33.50 | 10.14 |
| AD-159130 | 24.80 | 4.33 |
| AD-159134 | 10.46 | 1.12 |
| AD-159343 | 34.97 | 8.91 |
| AD-159105 | 92.74 | 4.56 |
| AD-159183 | 41.08 | 12.03 |
| AD-159123 | 33.69 | 9.55 |
| AD-159181 | 32.21 | 14.92 |
| AD-159186 | 24.30 | 1.21 |
| AD-159187 | 46.71 | 2.58 |
| AD-159288 | 21.07 | 2.58 |
| AD-159306 | 30.47 | 5.46 |
| AD-159559 | 34.55 | 6.09 |
| AD-159344 | 14.12 | 7.20 |
| AD-159341 | 19.39 | 9.18 |
| AD-159729 | 49.48 | 4.73 |
| AD-158674 | 15.18 | 2.82 |
| AD-159604 | 23.15 | 13.21 |

TABLE 7
Modified Human/Mouse/Cyno/Rat, Mouse, Mouse/Rat, and Human/Cyno Cross-Reactive HAO1 iRNA Sequences

| | | | | SEQ | |
|---|---|---|---|---|---|
| Duplex | | SEQ ID | | ID | |
| Name | Sense Strand Sequence 5′ to 3′ | NO: | Antisense Strand Sequence 5′ to 3′ | NO: | Species |
| AD-62933 | GfsasAfuGfuGfaAfAfGfuCfaUfcGfaCfaAfL96 | 4140 | usUfsgUfcGfaUfgAfcuuUfcAfcAfuUfcsusg | 89 | Hs/Mm |
| AD-62939 | UfsusUfuCfaAfuGfGfGfuGfuCfcUfaGfgAfL96 | 4141 | usCfscUfaGfgAfcAfcccAfuUfgAfaAfasgsu | 90 | Hs/Mm |
| AD-62944 | GfsasAfaGfuCfaUfCfGfaCfaAfgAfcAfuUfL96 | 4142 | asAfsuGfuCfuUfgUfcgaUfgAfcUfuUfcsasc | 91 | Hs/Mm |
| AD-62949 | UfscsAfuCfgAfcAfAfGfaCfaUfuGfgUfgAfL96 | 4143 | usCfsaCfcAfaUfgUfcuuGfuCfgAfuGfascsu | 92 | Hs/Mm |
| AD-62954 | UfsusUfcAfaUfgGfGfUfgUfcCfuAfgGfaAfL96 | 4144 | usUfscCfuAfgGfaCfaccCfaUfuGfaAfasasg | 93 | Hs/Mm |
| AD-62959 | AfsasUfgGfgUfgUfCfCfuAfgGfaAfcCfuUfL96 | 4145 | asAfsgGfuUfcCfuAfggaCfaCfcCfaUfusgsa | 94 | Hs/Mm |
| AD-62964 | GfsasCfaGfuGfcAfCfAfaUfaUfuUfuCfcAfL96 | 4146 | usGfsgAfaAfaUfaUfuguGfcAfcUfgUfcsasg | 95 | Hs/Mm |
| AD-62969 | AfscsUfuUfuCfaAfUfGfgGfuGfuCfcUfaAfL96 | 4147 | usUfsaGfgAfcAfcCfcauUfgAfaAfaGfuscsa | 96 | Hs/Mm |
| AD-62934 | AfsasGfuCfaUfcGfAfCfaAfgAfcAfuUfgAfL96 | 4148 | usCfsaAfuGfuCfuUfgucGfaUfgAfcUfususc | 97 | Hs/Mm |
| AD-62940 | AfsusCfgAfcAfaGfAfCfaUfuGfgUfgAfgAfL96 | 4149 | usCfsuCfaCfcAfaUfgucUfuGfuCfgAfusgsa | 98 | Hs/Mm |
| AD-62945 | GfsgsGfaGfaAfaGfGfUfgUfuCfaAfgAfuAfL96 | 4150 | usAfsuCfuUfgAfaCfaccUfuUfcUfcCfcscsc | 99 | Hs/Mm |
| AD-62950 | CfsusUfuUfcAfaUfGfGfgUfgUfcCfuAfgAfL96 | 29 | usCfsuAfgGfaCfaCfccaUfuGfaAfaAfgsusc | 100 | Hs/Mm |
| AD-62955 | UfscsAfaUfgGfgUfGfUfcCfuAfgGfaAfcAfL96 | 30 | usGfsuUfcCfuAfgGfacaCfcCfaUfuGfasasa | 101 | Hs/Mm |
| AD-62960 | UfsusGfaCfuUfuUfCfAfaUfgGfgUfgUfcAfL96 | 31 | usGfsaCfaCfcCfaUfugaAfaAfgUfcAfasasa | 102 | Hs/Mm |
| AD-62965 | AfsasAfgUfcAfuCfGfAfcAfaGfaCfaUfuAfL96 | 32 | usAfsaUfgUfcUfuGfucgAfuGfaCfuUfuscsa | 103 | Hs/Mm |
| AD-62970 | CfsasGfgGfgGfaGfAfAfaGfgUfgUfuCfaAfL96 | 33 | usUfsgAfaCfaCfcUfuucUfcCfcCfcUfgsgsa | 104 | Hs/Mm |
| AD-62935 | CfsasUfuGfgUfgAfGfGfaAfaAfaUfcCfuUfL96 | 34 | asAfsgGfaUfuUfuUfccuCfaCfcAfaUfgsusc | 105 | Hs/Mm |
| AD-62941 | AfscsAfuUfgGfuGfAfGfgAfaAfaAfuCfcUfL96 | 35 | asGfsgAfuUfuUfuCfcucAfcCfaAfuGfuscsu | 106 | Hs/Mm |
| AD-62946 | AfsgsGfgGfgAfgAfAfAfgGfuGfuUfcAfaAfL96 | 36 | usUfsuGfaAfcAfcCfuuuCfuCfcCfcCfusgsg | 107 | Hs/Mm |
| AD-62951 | AfsusGfgUfgGfuAfAfUfuUfgUfgAfuUfuUfL96 | 37 | asAfsaAfuCfaCfaAfauuAfcCfaCfcAfuscsc | 108 | Hs |
| AD-62956 | GfsasCfuUfgCfaUfCfCfuGfgAfaAfuAfuAfL96 | 38 | usAfsuAfuUfuCfcAfggaUfgCfaAfgUfcscsa | 109 | Hs |
| AD-62961 | GfsgsAfaGfgGfaAfGfGfuAfgAfaGfuCfuUfL96 | 39 | asAfsgAfcUfuCfuAfccuUfcCfcUfuCfcsasc | 110 | Hs |
| AD-62966 | UfsgsUfcUfuCfuGfUfUfuAfgAfuUfuCfcUfL96 | 40 | asGfsgAfaAfuCfuAfaacAfgAfaGfaCfasgsg | 111 | Hs |
| AD-62971 | CfsusUfuGfgCfuGfUfUfuCfcAfaGfaUfcUfL96 | 41 | asGfsaUfcUfuGfgAfaacAfgCfcAfaAfgsgsa | 112 | Hs |
| AD-62936 | AfsasUfgUfgUfuUfGfGfgCfaAfcGfuCfaUfL96 | 42 | asUfsgAfcGfuUfgCfccaAfaCfaCfaUfususu | 113 | Hs |
| AD-62942 | UfsgsUfgAfcUfgUfGfGfaCfaCfcCfcUfuAfL96 | 43 | usAfsaGfgGfgUfgUfccaCfaGfuCfaCfasasa | 114 | Hs |
| AD-62947 | GfsasUfgGfgGfuGfCfCfaGfcUfaCfuAfuUfL96 | 44 | asAfsuAfgUfaGfcUfggcAfcCfcCfaUfcscsa | 115 | Hs |
| AD-62952 | GfsasAfaAfuGfuGfUfUfuGfgGfcAfaCfgUfL96 | 45 | asCfsgUfuGfcCfcAfaacAfcAfuUfuUfcsasa | 116 | Hs |
| AD-62957 | GfsgsCfuGfuUfuCfCfAfaGfaUfcUfgAfcAfL96 | 46 | usGfsuCfaGfaUfcUfuggAfaAfcAfgCfcsasa | 117 | Hs |
| AD-62962 | UfscsCfaAfcAfaAfAfUfaGfcCfaCfcCfcUfL96 | 47 | asGfsgGfgUfgGfcUfauuUfuGfuUfgGfasasa | 118 | Hs |
| AD-62967 | GfsusCfuUfcUfgUfUfUfaGfaUfuUfcCfuUfL96 | 48 | asAfsgGfaAfaUfcUfaaaCfaGfaAfgAfcsasg | 119 | Hs |
| AD-62972 | UfsgsGfaAfgGfgAfAfGfgUfaGfaAfgUfcUfL96 | 49 | asGfsaCfuUfcUfaCfcuuCfcCfuUfcCfascsa | 120 | Hs |
| AD-62937 | UfscsCfuUfuGfgCfUfGfuUfuCfcAfaGfaUfL96 | 50 | asUfscUfuGfgAfaAfcagCfcAfaAfgGfasusu | 121 | Hs |
| AD-62943 | CfsasUfcUfcUfcAfGfCfuGfgGfaUfgAfuAfL96 | 51 | usAfsuCfaUfcCfcAfgcuGfaGfaGfaUfgsgsg | 122 | Hs |
| AD-62948 | GfsgsGfgUfgCfcAfGfCfuAfcUfaUfuGfaUfL96 | 52 | asUfscAfaUfaGfuAfgcuGfgCfaCfcCfcsasu | 123 | Hs |
| AD-62953 | AfsusGfuGfuUfuGfGfGfcAfaCfgUfcAfuAfL96 | 53 | usAfsuGfaCfgUfuGfcccAfaAfcAfcAfususu | 124 | Hs |
| AD-62958 | CfsusGfuUfuAfgAfUfUfuCfcUfuAfaGfaAfL96 | 54 | usUfscUfuAfaGfgAfaauCfuAfaAfcAfgsasa | 125 | Hs |
| AD-62963 | AfsgsAfaAfgAfaAfUfGfgAfcUfuGfcAfuAfL96 | 55 | usAfsuGfcAfaGfuCfcauUfuCfuUfuCfusasg | 126 | Hs |
| AD-62968 | GfscsAfuCfcUfgGfAfAfaUfaUfaUfuAfaAfL96 | 56 | usUfsuAfaUfaUfaUfuucCfaGfgAfuGfcsasa | 127 | Hs |
| AD-62973 | CfscsUfgUfcAfgAfCfCfaUfgGfgAfaCfuAfL96 | 57 | usAfsgUfuCfcCfaUfgguCfuGfaCfaGfgscsu | 128 | Hs |
| AD-62938 | AfsasAfcAfuGfgUfGfUfgGfaUfgGfgAfuAfL96 | 58 | usAfsuCfcCfaUfcCfacaCfcAfuGfuUfusasa | 129 | Hs |
| AD-62974 | CfsusCfaGfgAfuGfAfAfaAfaUfuUfuGfaAfL96 | 59 | usUfscAfaAfaUfuUfuucAfuCfcUfgAfgsusu | 130 | Hs |
| AD-62978 | CfsasGfcAfuGfuAfUfUfaCfuUfgAfcAfaAfL96 | 60 | usUfsuGfuCfaAfgUfaauAfcAfuGfcUfgsasa | 131 | Hs |
| AD-62982 | UfsasUfgAfaCfaAfCfAfuGfcUfaAfaUfcAfL96 | 61 | usGfsaUfuUfaGfcAfuguUfgUfuCfaUfasasu | 132 | Hs |
| AD-62986 | AfsusAfuAfuCfcAfAfAfuGfuUfuUfaGfgAfL96 | 62 | usCfscUfaAfaAfcAfuuuGfgAfuAfuAfususc | 133 | Hs |
| AD-62990 | CfscsAfgAfuGfgAfAfGfcUfgUfaUfcCfaAfL96 | 63 | usUfsgGfaUfaCfaGfcuuCfcAfuCfuGfgsasa | 134 | Hs |
| AD-62994 | GfsasCfuUfuCfaUfCfCfuGfgAfaAfuAfuAfL96 | 64 | usAfsuAfuUfuCfcAfggaUfgAfaAfgUfcscsa | 135 | Hs |
| AD-62998 | CfscsCfcGfgCfuAfAfUfuUfgUfaUfcAfaUfL96 | 65 | asUfsuGfaUfaCfaAfauuAfgCfcGfgGfgsgsa | 136 | Hs |
| AD-63002 | UfsusAfaAfcAfuGfGfCfuUfgAfaUfgGfgAfL96 | 66 | usCfscCfaUfuCfaAfgccAfuGfuUfuAfascsa | 137 | Hs |
| AD-62975 | AfsasUfgUfgUfuUfAfGfaCfaAfcGfuCfaUfL96 | 67 | asUfsgAfcGfuUfgUfcuaAfaCfaCfaUfususu | 138 | Mm |
| AD-62979 | AfscsUfaAfaGfgAfAfGfaAfuUfcCfgGfuUfL96 | 68 | asAfscCfgGfaAfuUfcuuCfcUfuUfaGfusasu | 139 | Mm |
| AD-62983 | UfsasUfaUfcCfaAfAfUfgUfuUfuAfgGfaUfL96 | 69 | asUfscCfuAfaAfaCfauuUfgGfaUfaUfasusu | 140 | Mm |
| AD-62987 | GfsusGfcGfgAfaAfGfGfcAfcUfgAfuGfuUfL96 | 70 | asAfscAfuCfaGfuGfccuUfuCfcGfcAfcsasc | 141 | Mm |
| AD-62991 | UfsasAfaAfcAfgUfGfGfuUfcUfuAfaAfuUfL96 | 71 | asAfsuUfuAfaGfaAfccaCfuGfuUfuUfasasa | 142 | Mm |
| AD-62995 | AfsusGfaAfaAfaUfUfUfuGfaAfaCfcAfgUfL96 | 72 | asCfsuGfgUfuUfcAfaaaUfuUfuUfcAfuscsc | 143 | Mm |
| AD-62999 | AfsasCfaAfaAfuAfGfCfaAfuCfcCfuUfuUfL96 | 73 | asAfsaAfgGfgAfuUfgcuAfuUfuUfgUfusgsg | 144 | Mm |
| AD-63003 | CfsusGfaAfaCfaGfAfUfcUfgUfcGfaCfuUfL96 | 74 | asAfsgUfcGfaCfaGfaucUfgUfuUfcAfgscsa | 145 | Mm |
| AD-62976 | UfsusGfuUfgCfaAfAfGfgGfcAfuUfuUfgAfL96 | 75 | usCfsaAfaAfuGfcCfcuuUfgCfaAfcAfasusu | 146 | Mm |
| AD-62980 | CfsusCfaUfuGfuUfUfAfuUfaAfcCfuGfuAfL96 | 76 | usAfscAfgGfuUfaAfuaaAfcAfaUfgAfgsasu | 147 | Mm |
| AD-62984 | CfsasAfcAfaAfaUfAfGfcAfaUfcCfcUfuUfL96 | 77 | asAfsaGfgGfaUfuGfcuaUfuUfuGfuUfgsgsa | 148 | Mm |
| AD-62992 | CfsasUfuGfuUfuAfUfUfaAfcCfuGfuAfuUfL96 | 78 | asAfsuAfcAfgGfuUfaauAfaAfcAfaUfgsasg | 149 | Mm |
| AD-62996 | UfsasUfcAfgCfuGfGfGfaAfgAfuAfuCfaAfL96 | 79 | usUfsgAfuAfuCfuUfcccAfgCfuGfaUfasgsa | 150 | Mm |
| AD-63000 | UfsgsUfcCfuAfgGfAfAfcCfuUfuUfaGfaAfL96 | 80 | usUfscUfaAfaAfgGfuucCfuAfgGfaCfascsc | 151 | Mm |
| AD-63004 | UfscsCfaAfcAfaAfAfUfaGfcAfaUfcCfcUfL96 | 81 | asGfsgGfaUfuGfcUfauuUfuGfuUfgGfasasa | 152 | Mm |
| AD-62977 | GfsgsUfgUfgCfgGfAfAfaGfgCfaCfuGfaUfL96 | 82 | asUfscAfgUfgCfcUfuucCfgCfaCfaCfcscsc | 153 | Mm |
| AD-62981 | UfsusGfaAfaCfcAfGfUfaCfuUfuAfuCfaUfL96 | 83 | asUfsgAfuAfaAfgUfacuGfgUfuUfcAfasasa | 154 | Mm |
| AD-62985 | UfsasCfuUfcCfaAfAfGfuCfuAfuAfuAfuAfL96 | 84 | usAfsuAfuAfuAfgAfcuuUfgGfaAfgUfascsu | 155 | Mm |
| AD-62989 | UfscsCfuAfgGfaAfCfCfuUfuUfaGfaAfaUfL96 | 85 | asUfsuUfcUfaAfaAfgguUfcCfuAfgGfascsa | 156 | Mm |
| AD-62993 | CfsusCfcUfgAfgGfAfAfaAfuUfuUfgGfaAfL96 | 86 | usUfscCfaAfaAfuUfuucCfuCfaGfgAfgsasa | 157 | Mm |
| AD-62997 | GfscsUfcCfgGfaAfUfGfuUfgCfuGfaAfaUfL96 | 87 | asUfsuUfcAfgCfaAfcauUfcCfgGfaGfcsasu | 158 | Mm |
| AD-63001 | GfsusGfuUfuGfuGfGfGfgAfgAfcCfaAfuAfL96 | 88 | usAfsuUfgGfuCfuCfcccAfcAfaAfcAfcsasg | 159 | Mm |

TABLE 8
Additional Modified Human/Mouse/Cyno/Rat, Human/Mouse/
Rat, Human/Mouse/Cyno, Mouse, Mouse/Rat, and Human/
Cyno Cross-Reactive HAO1 iRNA Sequences

| Duplex | | |
|---|---|---|
| Name | Sense Strand Sequence 5′ to 3′ | SEQ ID NO: |
| AD-62933.2 | GfsasAfuGfuGfaAfAfGfuCfaUfcGfaCfaAfL96 | 4140 |
| AD-62939.2 | UfsusUfuCfaAfuGfGfGfuGfuCfcUfaGfgAfL96 | 4141 |
| AD-62944.2 | GfsasAfaGfuCfaUfCfGfaCfaAfgAfcAfuUfL96 | 4142 |
| AD-62949.2 | UfscsAfuCfgAfcAfAfGfaCfaUfuGfgUfgAfL96 | 4143 |
| AD-62954.2 | UfsusUfcAfaUfgGfGfUfgUfcCfuAfgGfaAfL96 | 4144 |
| AD-62959.2 | AfsasUfgGfgUfgUfCfCfuAfgGfaAfcCfuUfL96 | 4145 |
| AD-62964.2 | GfsasCfaGfuGfcAfCfAfaUfaUfuUfuCfcAfL96 | 4146 |
| AD-62969.2 | AfscsUfuUfuCfaAfUfGfgGfuGfuCfcUfaAfL96 | 4147 |
| AD-62934.2 | AfsasGfuCfaUfcGfAfCfaAfgAfcAfuUfgAfL96 | 4148 |
| AD-62940.2 | AfsusCfgAfcAfaGfAfCfaUfuGfgUfgAfgAfL96 | 4149 |
| AD-62945.2 | GfsgsGfaGfaAfaGfGfUfgUfuCfaAfgAfuAfL96 | 4150 |
| AD-62950.2 | CfsusUfuUfcAfaUfGfGfgUfgUfcCfuAfgAfL96 | 29 |
| AD-62955.2 | UfscsAfaUfgGfgUfGfUfcCfuAfgGfaAfcAfL96 | 30 |
| AD-62960.2 | UfsusGfaCfuUfuUfCfAfaUfgGfgUfgUfcAfL96 | 31 |
| AD-62965.2 | AfsasAfgUfcAfuCfGfAfcAfaGfaCfaUfuAfL96 | 32 |
| AD-62970.2 | CfsasGfgGfgGfaGfAfAfaGfgUfgUfuCfaAfL96 | 33 |
| AD-62935.2 | CfsasUfuGfgUfgAfGfGfaAfaAfaUfcCfuUfL96 | 34 |
| AD-62941.2 | AfscsAfuUfgGfuGfAfGfgAfaAfaAfuCfcUfL96 | 35 |
| AD-62946.2 | AfsgsGfgGfgAfgAfAfAfgGfuGfuUfcAfaAfL96 | 36 |
| AD-62951.2 | AfsusGfgUfgGfuAfAfUfuUfgUfgAfuUfuUfL96 | 37 |
| AD-62956.2 | GfsasCfuUfgCfaUfCfCfuGfgAfaAfuAfuAfL96 | 38 |
| AD-62961.2 | GfsgsAfaGfgGfaAfGfGfuAfgAfaGfuCfuUfL96 | 39 |
| AD-62966.2 | UfsgsUfcUfuCfuGfUfUfuAfgAfuUfuCfcUfL96 | 40 |
| AD-62971.2 | CfsusUfuGfgCfuGfUfUfuCfcAfaGfaUfcUfL96 | 41 |
| AD-62936.2 | AfsasUfgUfgUfuUfGfGfgCfaAfcGfuCfaUfL96 | 42 |
| AD-62942.2 | UfsgsUfgAfcUfgUfGfGfaCfaCfcCfcUfuAfL96 | 43 |
| AD-62947.2 | GfsasUfgGfgGfuGfCfCfaGfcUfaCfuAfuUfL96 | 44 |
| AD-62952.2 | GfsasAfaAfuGfuGfUfUfuGfgGfcAfaCfgUfL96 | 45 |
| AD-62957.2 | GfsgsCfuGfuUfuCfCfAfaGfaUfcUfgAfcAfL96 | 46 |
| AD-62962.2 | UfscsCfaAfcAfaAfAfUfaGfcCfaCfcCfcUfL96 | 47 |
| AD-62967.2 | GfsusCfuUfcUfgUfUfUfaGfaUfuUfcCfuUfL96 | 48 |
| AD-62972.2 | UfsgsGfaAfgGfgAfAfGfgUfaGfaAfgUfcUfL96 | 49 |
| AD-62937.2 | UfscsCfuUfuGfgCfUfGfuUfuCfcAfaGfaUfL96 | 50 |
| AD-62943.2 | CfsasUfcUfcUfcAfGfCfuGfgGfaUfgAfuAfL96 | 51 |
| AD-62948.2 | GfsgsGfgUfgCfcAfGfCfuAfcUfaUfuGfaUfL96 | 52 |
| AD-62953.2 | AfsusGfuGfuUfuGfGfGfcAfaCfgUfcAfuAfL96 | 53 |
| AD-62958.2 | CfsusGfuUfuAfgAfUfUfuCfcUfuAfaGfaAfL96 | 54 |
| AD-62963.2 | AfsgsAfaAfgAfaAfUfGfgAfcUfuGfcAfuAfL96 | 55 |
| AD-62968.2 | GfscsAfuCfcUfgGfAfAfaUfaUfaUfuAfaAfL96 | 56 |
| AD-62973.2 | CfscsUfgUfcAfgAfCfCfaUfgGfgAfaCfuAfL96 | 57 |
| AD-62938.2 | AfsasAfcAfuGfgUfGfUfgGfaUfgGfgAfuAfL96 | 58 |
| AD-62974.2 | CfsusCfaGfgAfuGfAfAfaAfaUfuUfuGfaAfL96 | 59 |
| AD-62978.2 | CfsasGfcAfuGfuAfUfUfaCfuUfgAfcAfaAfL96 | 60 |
| AD-62982.2 | UfsasUfgAfaCfaAfCfAfuGfcUfaAfaUfcAfL96 | 61 |
| AD-62986.2 | AfsusAfuAfuCfcAfAfAfuGfuUfuUfaGfgAfL96 | 62 |
| AD-62990.2 | CfscsAfgAfuGfgAfAfGfcUfgUfaUfcCfaAfL96 | 63 |
| AD-62994.2 | GfsasCfuUfuCfaUfCfCfuGfgAfaAfuAfuAfL96 | 64 |
| AD-62998.2 | CfscsCfcGfgCfuAfAfUfuUfgUfaUfcAfaUfL96 | 65 |
| AD-63002.2 | UfsusAfaAfcAfuGfGfCfuUfgAfaUfgGfgAfL96 | 66 |
| AD-62975.2 | AfsasUfgUfgUfuUfAfGfaCfaAfcGfuCfaUfL96 | 67 |
| AD-62979.2 | AfscsUfaAfaGfgAfAfGfaAfuUfcCfgGfuUfL96 | 68 |
| AD-62983.2 | UfsasUfaUfcCfaAfAfUfgUfuUfuAfgGfaUfL96 | 69 |
| AD-62987.2 | GfsusGfcGfgAfaAfGfGfcAfcUfgAfuGfuUfL96 | 70 |
| AD-62991.2 | UfsasAfaAfcAfgUfGfGfuUfcUfuAfaAfuUfL96 | 71 |
| AD-62995.2 | AfsusGfaAfaAfaUfUfUfuGfaAfaCfcAfgUfL96 | 72 |
| AD-62999.2 | AfsasCfaAfaAfuAfGfCfaAfuCfcCfuUfuUfL96 | 73 |
| AD-63003.2 | CfsusGfaAfaCfaGfAfUfcUfgUfcGfaCfuUfL96 | 74 |
| AD-62976.2 | UfsusGfuUfgCfaAfAfGfgGfcAfuUfuUfgAfL96 | 75 |
| AD-62980.2 | CfsusCfaUfuGfuUfUfAfuUfaAfcCfuGfuAfL96 | 76 |
| AD-62984.2 | CfsasAfcAfaAfaUfAfGfcAfaUfcCfcUfuUfL96 | 77 |
| AD-62992.2 | CfsasUfuGfuUfuAfUfUfaAfcCfuGfuAfuUfL96 | 78 |
| AD-62996.2 | UfsasUfcAfgCfuGfGfGfaAfgAfuAfuCfaAfL96 | 79 |
| AD-63000.2 | UfsgsUfcCfuAfgGfAfAfcCfuUfuUfaGfaAfL96 | 80 |
| AD-63004.2 | UfscsCfaAfcAfaAfAfUfaGfcAfaUfcCfcUfL96 | 81 |
| AD-62977.2 | GfsgsUfgUfgCfgGfAfAfaGfgCfaCfuGfaUfL96 | 82 |
| AD-62981.2 | UfsusGfaAfaCfcAfGfUfaCfuUfuAfuCfaUfL96 | 83 |
| AD-62985.2 | UfsasCfuUfcCfaAfAfGfuCfuAfuAfuAfuAfL96 | 84 |
| AD-62989.2 | UfscsCfuAfgGfaAfCfCfuUfuUfaGfaAfaUfL96 | 85 |
| AD-62993.2 | CfsusCfcUfgAfgGfAfAfaAfuUfuUfgGfaAfL96 | 86 |
| AD-62997.2 | GfscsUfcCfgGfaAfUfGfuUfgCfuGfaAfaUfL96 | 87 |
| AD-63001.2 | GfsusGfuUfuGfuGfGfGfgAfgAfcCfaAfuAfL96 | 88 |
| AD-62933.1 | GfsasAfuGfuGfaAfAfGfuCfaUfcGfaCfaAfL96 | 160 |
| AD-65630.1 | Y44gsasAfuGfuGfaAfAfGfuCfaUfcGfaCfaAfL96 | 161 |
| AD-65636.1 | gsasauguGfaAfAfGfucauCfgacaaL96 | 162 |
| AD-65642.1 | gsasauguGfaAfAfGfucaucgacaaL96 | 163 |
| AD-65647.1 | gsasauguGfaaAfGfucaucgacaaL96 | 164 |
| AD-65652.1 | gsasauguGfaaaGfucaucGfacaaL96 | 165 |
| AD-65657.1 | gsasaugugaaaGfucaucGfacaaL96 | 166 |
| AD-65662.1 | gsasauguGfaaaGfucaucgacaaL96 | 167 |
| AD-65625.1 | AfsusGfuGfaAfAfGfuCfaUfcGfaCfaAfL96 | 168 |
| AD-65631.1 | asusguGfaAfAfGfucaucgacaaL96 | 169 |
| AD-65637.1 | GfsasAfuGfuGfaAfAfGfuCfaUfcGfaCfaAfL96 | 170 |
| AD-65643.1 | GfsasAfuGfuGfaAfAfGfuCfaUfcGfaCfaAfL96 | 171 |
| AD-65648.1 | GfsasAfuGfuGfaAfAfGfuCfaUfcGfaCfaAfL96 | 172 |
| AD-65653.1 | GfsasAfuGfuGfaAfAfGfuCfaUfcGfaCfaAfL96 | 173 |
| AD-65658.1 | GfsasAfuGfuGfaAfAfGfuCfaUfcGfaCfaAfL96 | 174 |
| AD-65663.1 | gsasauguGfaAfAfGfucaucgacaaL96 | 175 |
| AD-65626.1 | gsasauguGfaAfAfGfucaucgacaaL96 | 176 |
| AD-65638.1 | gsasauguGfaaAfGfucaucgacaaL96 | 177 |
| AD-65644.1 | gsasauguGfaaAfGfucaucgacaaL96 | 178 |
| AD-65649.1 | gsasauguGfaaAfGfucaucgacaaL96 | 179 |
| AD-65654.1 | gsasaugugaaagucau(Cgn)gacaaL96 | 180 |
| AD-65659.1 | gsasaugdTgaaagucau(Cgn)gacaaL96 | 181 |
| AD-65627.1 | gsasaudGugaaadGucau(Cgn)gacaaL96 | 182 |
| AD-65633.1 | gsasaugdTgaaadGucau(Cgn)gacaaL96 | 183 |
| AD-65639.1 | gsasaugudGaaadGucau(Cgn)gacaaL96 | 184 |
| AD-65645.1 | gsasaugugaaadGucaucdGacaaL96 | 185 |
| AD-65650.1 | gsasaugugaaadGucaucdTacaaL96 | 186 |
| AD-65655.1 | gsasaugugaaadGucaucY34acaaL96 | 187 |
| AD-65660.1 | gsasaugugaaadGucadTcdTacaaL96 | 188 |
| AD-65665.1 | gsasaugugaaadGucaucdGadCaaL96 | 189 |
| AD-65628.1 | gsasaugugaaadGucaucdTadCaaL96 | 190 |
| AD-65634.1 | gsasaugugaaadGucaucY34adCaaL96 | 191 |
| AD-65646.1 | GfsasAfuGfuGfaAfAfGfuCfaUfcGfaCfaAfL96 | 192 |
| AD-65656.1 | GfsasAfuGfuGfaAfAfGfuCfaUfcGfaCfaAfL96 | 193 |
| AD-65661.1 | GfsasAfuGfuGfaAfAfGfuCfaUfcGfaCfaAfL96 | 194 |
| AD-65666.1 | GfsasAfuGfuGfaAfAfGfuCfaUfcGfaCfaAfL96 | 195 |
| AD-65629.1 | GfsasAfuGfuGfaAfAfGfuCfaUfcGfaCfaAfL96 | 196 |
| AD-65635.1 | GfsasAfuGfuGfaAfAfGfuCfaUfcGfaCfaAfL96 | 197 |
| AD-65641.1 | gsasaugugaaadGucau(Cgn)gacaaL96 | 198 |
| AD-62994.1 | GfsasCfuUfuCfaUfCfCfuGfgAfaAfuAfuAfL96 | 199 |
| AD-65595.1 | gsascuuuCfaUfCfCfuggaAfauauaL96 | 200 |
| AD-65600.1 | gsascuuuCfaUfCfCfuggaaauauaL96 | 201 |
| AD-65610.1 | gsascuuuCfaucCfuggaaAfuauaL96 | 202 |
| AD-65615.1 | gsascuuucaucCfuggaaAfuauaL96 | 203 |
| AD-65620.1 | gsascuuuCfaucCfuggaaauauaL96 | 204 |
| AD-65584.1 | CfsusUfuCfaUfCfCfuGfgAfaAfuAfuAfL96 | 205 |
| AD-65590.1 | csusuuCfaUfCfCfuggaaauauaL96 | 206 |
| AD-65596.1 | GfsasCfuUfuCfaUfCfCfuGfgAfaAfuAfuAfL96 | 207 |
| AD-65601.1 | GfsasCfuUfuCfaUfCfCfuGfgAfaAfuAfuAfL96 | 208 |
| AD-65606.1 | GfsasCfuUfuCfaUfCfCfuGfgAfaAfuAfuAfL96 | 209 |
| AD-65611.1 | GfsasCfuUfuCfaUfCfCfuGfgAfaAfuAfuAfL96 | 210 |
| AD-65616.1 | GfsasCfuUfuCfaUfCfCfuGfgAfaAfuAfuAfL96 | 211 |
| AD-65621.1 | gsascuuuCfaUfCfCfuggaaauauaL96 | 212 |
| AD-65585.1 | gsascuuuCfaUfCfCfuggaaauauaL96 | 213 |
| AD-65591.1 | gsascuuuCfaUfCfCfuggaaauauaL96 | 214 |
| AD-65597.1 | gsascuuuCfauCfCfuggaaauauaL96 | 215 |
| AD-65602.1 | gsascuuuCfauCfCfuggaaauauaL96 | 216 |
| AD-65607.1 | gsascuuuCfauCfCfuggaaauauaL96 | 217 |
| AD-65612.1 | gsascuuucauccuggaa(Agn)uauaL96 | 218 |
| AD-65622.1 | gsascuuucaucdCuggaa(Agn)uauaL96 | 219 |
| AD-65586.1 | gsascudTucaucdCuggaa(Agn)uauaL96 | 220 |
| AD-65592.1 | gsascuudTcaucdCuggaa(Agn)uauaL96 | 221 |
| AD-65598.1 | gsascuuudCaucdCuggaa(Agn)uauaL96 | 222 |
| AD-65603.1 | gsascuuucaucdCuggaadAuauaL96 | 223 |
| AD-65608.1 | gsascuuucaucdCuggaadTuauaL96 | 224 |
| AD-65613.1 | gsascuuucaucdCuggaaY34uauaL96 | 225 |
| AD-65618.1 | gsascuuucaucdCuggdAadTuauaL96 | 226 |
| AD-65623.1 | gsascuuucaucdCuggaadTudAuaL96 | 227 |
| AD-65587.1 | gsascuuucaucdCuggaa(Agn)udAuaL96 | 228 |
| AD-65593.1 | gsascuudTcaucdCuggaadAudAuaL96 | 229 |
| AD-65599.1 | GfsasCfuUfuCfaUfCfCfuGfgAfaAfuAfuAfL96 | 230 |
| AD-65604.1 | GfsasCfuUfuCfaUfCfCfuGfgAfaAfuAfuAfL96 | 231 |
| AD-65609.1 | GfsasCfuUfuCfaUfCfCfuGfgAfaAfuAfuAfL96 | 232 |
| AD-65614.1 | GfsasCfuUfuCfaUfCfCfuGfgAfaAfuAfuAfL96 | 233 |
| AD-65619.1 | GfsasCfuUfuCfaUfCfCfuGfgAfaAfuAfuAfL96 | 234 |
| AD-65624.1 | GfsasCfuUfuCfaUfCfCfuGfgAfaAfuAfuAfL96 | 235 |
| AD-65588.1 | GfsasCfuUfuCfaUfCfCfuGfgAfaAfuAfuAfL96 | 236 |
| AD-65594.1 | gsascuuucaucdCuggaa(Agn)uauaL96 | 237 |
| AD-68309.1 | asgsaaagGfuGfUfUfcaagaugucaL96 | 238 |
| AD-68303.1 | csasuccuGfgAfAfAfuauauuaacuL96 | 239 |
| AD-65626.5 | gsasauguGfaAfAfGfucaucgacaaL96 | 240 |
| AD-68295.1 | asgsugcaCfaAfUfAfuuuucccauaL96 | 241 |
| AD-68273.1 | gsasaaguCfaUfCfGfacaagacauuL96 | 242 |
| AD-68297.1 | asasugugAfaAfGfUfcaucgacaaaL96 | 243 |
| AD-68287.1 | csusggaaAfuAfUfAfuuaacuguuaL96 | 244 |
| AD-68300.1 | asusuuucCfcAfUfCfuguauuauuuL96 | 245 |
| AD-68306.1 | usgsucguUfcUfUfUfuccaacaaaaL96 | 246 |
| AD-68292.1 | asusccugGfaAfAfUfauauuaacuaL96 | 247 |
| AD-68298.1 | gscsauuuUfgAfGfAfggugaugauaL96 | 248 |
| AD-68277.1 | csasggggGfaGfAfAfagguguucaaL96 | 249 |
| AD-68289.1 | gsgsaaauAfuAfUfUfaacuguuaaaL96 | 250 |
| AD-68272.1 | csasuuggUfgAfGfGfaaaaauccuuL96 | 251 |
| AD-68282.1 | gsgsgagaAfaGfGfUfguucaagauaL96 | 252 |
| AD-68285.1 | gsgscauuUfuGfAfGfaggugaugauL96 | 253 |
| AD-68290.1 | usascaaaGfgGfUfGfucguucuuuuL96 | 254 |
| AD-68296.1 | usgsggauCfuUfGfGfugucgaaucaL96 | 255 |
| AD-68288.1 | csusgacaGfuGfCfAfcaauauuuuaL96 | 256 |
| AD-68299.1 | csasgugcAfcAfAfUfauuuucccauL96 | 257 |
| AD-68275.1 | ascsuuuuCfaAfUfGfgguguccuaaL96 | 258 |
| AD-68274.1 | ascsauugGfuGfAfGfgaaaaauccuL96 | 259 |
| AD-68294.1 | ususgcuuUfuGfAfCfuuuucaaugaL96 | 260 |
| AD-68302.1 | csasuuuuGfaGfAfGfgugaugaugaL96 | 261 |
| AD-68279.1 | ususgacuUfuUfCfAfaugggugucaL96 | 262 |
| AD-68304.1 | csgsacuuCfuGfUfUfuuaggacagaL96 | 263 |
| AD-68286.1 | csuscugaGfuGfGfGfugccagaauaL96 | 264 |
| AD-68291.1 | gsgsgugcCfaGfAfAfugugaaaguaL96 | 265 |
| AD-68283.1 | uscsaaugGfgUfGfUfccuaggaacaL96 | 266 |
| AD-68280.1 | asasagucAfuCfGfAfcaagacauuaL96 | 267 |
| AD-68293.1 | asusuuugAfgAfGfGfugaugaugcaL96 | 268 |
| AD-68276.1 | asuscgacAfaGfAfCfauuggugagaL96 | 269 |
| AD-68308.1 | gsgsugccAfgAfAfUfgugaaagucaL96 | 270 |
| AD-68278.1 | gsascaguGfcAfCfAfauauuuuccaL96 | 271 |
| AD-68307.1 | ascsaaagAfgAfCfAfcugugcagaaL96 | 272 |
| AD-68284.1 | ususuucaAfuGfGfGfuguccuaggaL96 | 273 |
| AD-68301.1 | cscsguuuCfcAfAfGfaucugacaguL96 | 274 |
| AD-68281.1 | asgsggggAfgAfAfAfgguguucaaaL96 | 275 |
| AD-68305.1 | asgsucauCfgAfCfAfagacauugguL96 | 276 |

| Duplex | | SEQ | |
|---|---|---|---|
| Name | Antisense Strand Sequence 5′ to 3′ | ID NO: | Species |
| AD-62933.2 | usUfsgUfcGfaUfgAfcuuUfcAfcAfuUfcsusg | 89 | Hs/Mm |
| AD-62939.2 | usCfscUfaGfgAfcAfcccAfuUfgAfaAfasgsu | 90 | Hs/Mm |
| AD-62944.2 | asAfsuGfuCfuUfgUfcgaUfgAfcUfuUfcsasc | 91 | Hs/Mm |
| AD-62949.2 | usCfsaCfcAfaUfgUfcuuGfuCfgAfuGfascsu | 92 | Hs/Mm |
| AD-62954.2 | usUfscCfuAfgGfaCfaccCfaUfuGfaAfasasg | 93 | Hs/Mm |
| AD-62959.2 | asAfsgGfuUfcCfuAfggaCfaCfcCfaUfusgsa | 94 | Hs/Mm |
| AD-62964.2 | usGfsgAfaAfaUfaUfuguGfcAfcUfgUfcsasg | 95 | Hs/Mm |
| AD-62969.2 | usUfsaGfgAfcAfcCfcauUfgAfaAfaGfuscsa | 96 | Hs/Mm |
| AD-62934.2 | usCfsaAfuGfuCfuUfgucGfaUfgAfcUfususc | 97 | Hs/Mm |
| AD-62940.2 | usCfsuCfaCfcAfaUfgucUfuGfuCfgAfusgsa | 98 | Hs/Mm |
| AD-62945.2 | usAfsuCfuUfgAfaCfaccUfuUfcUfcCfcscsc | 99 | Hs/Mm |
| AD-62950.2 | usCfsuAfgGfaCfaCfccaUfuGfaAfaAfgsusc | 100 | Hs/Mm |
| AD-62955.2 | usGfsuUfcCfuAfgGfacaCfcCfaUfuGfasasa | 101 | Hs/Mm |
| AD-62960.2 | usGfsaCfaCfcCfaUfugaAfaAfgUfcAfasasa | 102 | Hs/Mm |
| AD-62965.2 | usAfsaUfgUfcUfuGfucgAfuGfaCfuUfuscsa | 103 | Hs/Mm |
| AD-62970.2 | usUfsgAfaCfaCfcUfuucUfcCfcCfcUfgsgsa | 104 | Hs/Mm |
| AD-62935.2 | asAfsgGfaUfuUfuUfccuCfaCfcAfaUfgsusc | 105 | Hs/Mm |
| AD-62941.2 | asGfsgAfuUfuUfuCfcucAfcCfaAfuGfuscsu | 106 | Hs/Mm |
| AD-62946.2 | usUfsuGfaAfcAfcCfuuuCfuCfcCfcCfusgsg | 107 | Hs/Mm |
| AD-62951.2 | asAfsaAfuCfaCfaAfauuAfcCfaCfcAfuscsc | 108 | Hs |
| AD-62956.2 | usAfsuAfuUfuCfcAfggaUfgCfaAfgUfcscsa | 109 | Hs |
| AD-62961.2 | asAfsgAfcUfuCfuAfccuUfcCfcUfuCfcsasc | 110 | Hs |
| AD-62966.2 | asGfsgAfaAfuCfuAfaacAfgAfaGfaCfasgsg | 111 | Hs |
| AD-62971.2 | asGfsaUfcUfuGfgAfaacAfgCfcAfaAfgsgsa | 112 | Hs |
| AD-62936.2 | asUfsgAfcGfuUfgCfccaAfaCfaCfaUfususu | 113 | Hs |
| AD-62942.2 | usAfsaGfgGfgUfgUfccaCfaGfuCfaCfasasa | 114 | Hs |
| AD-62947.2 | asAfsuAfgUfaGfcUfggcAfcCfcCfaUfcscsa | 115 | Hs |
| AD-62952.2 | asCfsgUfuGfcCfcAfaacAfcAfuUfuUfcsasa | 116 | Hs |
| AD-62957.2 | usGfsuCfaGfaUfcUfuggAfaAfcAfgCfcsasa | 117 | Hs |
| AD-62962.2 | asGfsgGfgUfgGfcUfauuUfuGfuUfgGfasasa | 118 | Hs |
| AD-62967.2 | asAfsgGfaAfaUfcUfaaaCfaGfaAfgAfcsasg | 119 | Hs |
| AD-62972.2 | asGfsaCfuUfcUfaCfcuuCfcCfuUfcCfascsa | 120 | Hs |
| AD-62937.2 | asUfscUfuGfgAfaAfcagCfcAfaAfgGfasusu | 121 | Hs |
| AD-62943.2 | usAfsuCfaUfcCfcAfgcuGfaGfaGfaUfgsgsg | 122 | Hs |
| AD-62948.2 | asUfscAfaUfaGfuAfgcuGfgCfaCfcCfcsasu | 123 | Hs |
| AD-62953.2 | usAfsuGfaCfgUfuGfcccAfaAfcAfcAfususu | 124 | Hs |
| AD-62958.2 | usUfscUfuAfaGfgAfaauCfuAfaAfcAfgsasa | 125 | Hs |
| AD-62963.2 | usAfsuGfcAfaGfuCfcauUfuCfuUfuCfusasg | 126 | Hs |
| AD-62968.2 | usUfsuAfaUfaUfaUfuucCfaGfgAfuGfcsasa | 127 | Hs |
| AD-62973.2 | usAfsgUfuCfcCfaUfgguCfuGfaCfaGfgscsu | 128 | Hs |
| AD-62938.2 | usAfsuCfcCfaUfcCfacaCfcAfuGfuUfusasa | 129 | Hs |
| AD-62974.2 | usUfscAfaAfaUfuUfuucAfuCfcUfgAfgsusu | 130 | Hs |
| AD-62978.2 | usUfsuGfuCfaAfgUfaauAfcAfuGfcUfgsasa | 131 | Hs |
| AD-62982.2 | usGfsaUfuUfaGfcAfuguUfgUfuCfaUfasasu | 132 | Hs |
| AD-62986.2 | usCfscUfaAfaAfcAfuuuGfgAfuAfuAfususc | 133 | Hs |
| AD-62990.2 | usUfsgGfaUfaCfaGfcuuCfcAfuCfuGfgsasa | 134 | Hs |
| AD-62994.2 | usAfsuAfuUfuCfcAfggaUfgAfaAfgUfcscsa | 135 | Hs |
| AD-62998.2 | asUfsuGfaUfaCfaAfauuAfgCfcGfgGfgsgsa | 136 | Hs |
| AD-63002.2 | usCfscCfaUfuCfaAfgccAfuGfuUfuAfascsa | 137 | Hs |
| AD-62975.2 | asUfsgAfcGfuUfgUfcuaAfaCfaCfaUfususu | 138 | Mm |
| AD-62979.2 | asAfscCfgGfaAfuUfcuuCfcUfuUfaGfusasu | 139 | Mm |
| AD-62983.2 | asUfscCfuAfaAfaCfauuUfgGfaUfaUfasusu | 140 | Mm |
| AD-62987.2 | asAfscAfuCfaGfuGfccuUfuCfcGfcAfcsasc | 141 | Mm |
| AD-62991.2 | asAfsuUfuAfaGfaAfccaCfuGfuUfuUfasasa | 142 | Mm |
| AD-62995.2 | asCfsuGfgUfuUfcAfaaaUfuUfuUfcAfuscsc | 143 | Mm |
| AD-62999.2 | asAfsaAfgGfgAfuUfgcuAfuUfuUfgUfusgsg | 144 | Mm |
| AD-63003.2 | asAfsgUfcGfaCfaGfaucUfgUfuUfcAfgscsa | 145 | Mm |
| AD-62976.2 | usCfsaAfaAfuGfcCfcuuUfgCfaAfcAfasusu | 146 | Mm |
| AD-62980.2 | usAfscAfgGfuUfaAfuaaAfcAfaUfgAfgsasu | 147 | Mm |
| AD-62984.2 | asAfsaGfgGfaUfuGfcuaUfuUfuGfuUfgsgsa | 148 | Mm |
| AD-62992.2 | asAfsuAfcAfgGfuUfaauAfaAfcAfaUfgsasg | 149 | Mm |
| AD-62996.2 | usUfsgAfuAfuCfuUfcccAfgCfuGfaUfasgsa | 150 | Mm |
| AD-63000.2 | usUfscUfaAfaAfgGfuucCfuAfgGfaCfascsc | 151 | Mm |
| AD-63004.2 | asGfsgGfaUfuGfcUfauuUfuGfuUfgGfasasa | 152 | Mm |
| AD-62977.2 | asUfscAfgUfgCfcUfuucCfgCfaCfaCfcscsc | 153 | Mm |
| AD-62981.2 | asUfsgAfuAfaAfgUfacuGfgUfuUfcAfasasa | 154 | Mm |
| AD-62985.2 | usAfsuAfuAfuAfgAfcuuUfgGfaAfgUfascsu | 155 | Mm |
| AD-62989.2 | asUfsuUfcUfaAfaAfgguUfcCfuAfgGfascsa | 156 | Mm |
| AD-62993.2 | usUfscCfaAfaAfuUfuucCfuCfaGfgAfgsasa | 157 | Mm |
| AD-62997.2 | asUfsuUfcAfgCfaAfcauUfcCfgGfaGfcsasu | 158 | Mm |
| AD-63001.2 | usAfsuUfgGfuCfuCfcccAfcAfaAfcAfcsasg | 159 | Mm |
| AD-62933.1 | usUfsgUfcGfaUfgAfcuuUfcAfcAfuUfcsusg | 277 | |
| AD-65630.1 | PusUfsgUfcGfaUfgAfcuuUfcAfcAfuUfcsusg | 278 | |
| AD-65636.1 | usUfsgUfcGfaUfgAfcuuUfcAfcAfuUfcsusg | 279 | |
| AD-65642.1 | usUfsgUfcGfaUfgAfcuuUfcAfcAfuUfcsusg | 280 | |
| AD-65647.1 | usUfsgUfcGfaUfgAfcuuUfcAfcAfuUfcsusg | 281 | |
| AD-65652.1 | usUfsgUfcGfaUfgAfcuuUfcAfcAfuUfcsusg | 282 | |
| AD-65657.1 | usUfsgUfcGfaUfgAfcuuUfcAfcAfuUfcsusg | 283 | |
| AD-65662.1 | usUfsgUfcGfaUfgAfcuuUfcAfcAfuUfcsusg | 284 | |
| AD-65625.1 | usUfsgUfcGfaUfgAfcuuUfcAfcAfususc | 285 | |
| AD-65631.1 | usUfsgucGfaugacuuUfcAfcaususc | 286 | |
| AD-65637.1 | usUfsgucGfaUfgAfcuuUfcAfcauucsusg | 287 | |
| AD-65643.1 | usUfsgucGfaUfGfacuuUfcAfcauucsusg | 288 | |
| AD-65648.1 | usUfsgucGfaugacuuUfcAfcauucsusg | 289 | |
| AD-65653.1 | usUfsgucGfaugacuuUfcacauucsusg | 290 | |
| AD-65658.1 | usUfsgucgaugacuuUfcacauucsusg | 291 | |
| AD-65663.1 | usUfsgucGfaUfgAfcuuUfcAfcauucsusg | 292 | |
| AD-65626.1 | usUfsgucGfaUfGfacuuUfcAfcauucsusg | 293 | |
| AD-65638.1 | usUfsgucGfaUfgAfcuuUfcAfcauucsusg | 294 | |
| AD-65644.1 | usUfsgucGfaUfGfacuuUfcAfcauucsusg | 295 | |
| AD-65649.1 | usUfsgucGfaugacuuUfcAfcauucsusg | 296 | |
| AD-65654.1 | usUfsgUfcGfaUfgAfcuuUfcAfcAfuUfcsusg | 297 | |
| AD-65659.1 | usUfsgUfcGfaUfgAfcuuUfcAfcAfuUfcsusg | 298 | |
| AD-65627.1 | usUfsgUfcGfaUfgAfcuuUfcAfcAfuUfcsusg | 299 | |
| AD-65633.1 | usUfsgUfcGfaUfgAfcuuUfcAfcAfuUfcsusg | 300 | |
| AD-65639.1 | usUfsgUfcGfaUfgAfcuuUfcAfcAfuUfcsusg | 301 | |
| AD-65645.1 | usUfsgUfcGfaUfgAfcuuUfcAfcAfuUfcsusg | 302 | |
| AD-65650.1 | usUfsgUfcGfaUfgAfcuuUfcAfcAfuUfcsusg | 303 | |
| AD-65655.1 | usUfsgUfcGfaUfgAfcuuUfcAfcAfuUfcsusg | 304 | |
| AD-65660.1 | usUfsgUfcGfaUfgAfcuuUfcAfcAfuUfcsusg | 305 | |
| AD-65665.1 | usUfsgUfcGfaUfgAfcuuUfcAfcAfuUfcsusg | 306 | |
| AD-65628.1 | usUfsgUfcGfaUfgAfcuuUfcAfcAfuUfcsusg | 307 | |
| AD-65634.1 | usUfsgUfcGfaUfgAfcuuUfcAfcAfuUfcsusg | 308 | |
| AD-65646.1 | usdTsgucgaugdAcuudTcacauucsusg | 309 | |
| AD-65656.1 | usUsgucgaugacuudTcacauucsusg | 310 | |
| AD-65661.1 | usdTsgucdGaugacuudTcacauucsusg | 311 | |
| AD-65666.1 | usUsgucdGaugacuudTcacauucsusg | 312 | |
| AD-65629.1 | usdTsgucgaugacuudTcdAcauucsusg | 313 | |
| AD-65635.1 | usdTsgucdGaugacuudTcdAcauucsusg | 314 | |
| AD-65641.1 | usdTsgucgaugdAcuudTcacauucsusg | 315 | |
| AD-62994.1 | usAfsuAfuUfuCfcAfggaUfgAfaAfgUfcscsa | 316 | |
| AD-65595.1 | usAfsuAfuUfuCfcAfggaUfgAfaAfgUfcscsa | 317 | |
| AD-65600.1 | usAfsuAfuUfuCfcAfggaUfgAfaAfgUfcscsa | 318 | |
| AD-65610.1 | usAfsuAfuUfuCfcAfggaUfgAfaAfgUfcscsa | 319 | |
| AD-65615.1 | usAfsuAfuUfuCfcAfggaUfgAfaAfgUfcscsa | 320 | |
| AD-65620.1 | usAfsuAfuUfuCfcAfggaUfgAfaAfgUfcscsa | 321 | |
| AD-65584.1 | usAfsuAfuUfuCfcAfggaUfgAfaAfgsusc | 322 | |
| AD-65590.1 | usAfsuauUfuccaggaUfgAfaagsusc | 323 | |
| AD-65596.1 | usAfsuauUfuCfcAfggaUfgAfaagucscsa | 324 | |
| AD-65601.1 | usAfsuauUfuCfCfaggaUfgAfaagucscsa | 325 | |
| AD-65606.1 | usAfsuauUfuccaggaUfgAfaagucscsa | 326 | |
| AD-65611.1 | usAfsuauUfuccaggaUfgaaagucscsa | 327 | |
| AD-65616.1 | usAfsuauuuccaggaUfgaaagucscsa | 328 | |
| AD-65621.1 | usAfsuauUfuCfcAfggaUfgAfaagucscsa | 329 | |
| AD-65585.1 | usAfsuauUfuCfCfaggaUfgAfaagucscsa | 330 | |
| AD-65591.1 | usAfsuauUfuccaggaUfgAfaagucscsa | 331 | |
| AD-65597.1 | usAfsuauUfuCfcAfggaUfgAfaagucscsa | 332 | |
| AD-65602.1 | usAfsuauUfuCfCfaggaUfgAfaagucscsa | 333 | |
| AD-65607.1 | usAfsuauUfuccaggaUfgAfaagucscsa | 334 | |
| AD-65612.1 | usAfsuAfuUfuCfcAfggaUfgAfaAfgUfcscsa | 335 | |
| AD-65622.1 | usAfsuAfuUfuCfcAfggaUfgAfaAfgUfcscsa | 336 | |
| AD-65586.1 | usAfsuAfuUfuCfcAfggaUfgAfaAfgUfcscsa | 337 | |
| AD-65592.1 | usAfsuAfuUfuCfcAfggaUfgAfaAfgUfcscsa | 338 | |
| AD-65598.1 | usAfsuAfuUfuCfcAfggaUfgAfaAfgUfcscsa | 339 | |
| AD-65603.1 | usAfsuAfuUfuCfcAfggaUfgAfaAfgUfcscsa | 340 | |
| AD-65608.1 | usAfsuAfuUfuCfcAfggaUfgAfaAfgUfcscsa | 341 | |
| AD-65613.1 | usAfsuAfuUfuCfcAfggaUfgAfaAfgUfcscsa | 342 | |
| AD-65618.1 | usAfsuAfuUfuCfcAfggaUfgAfaAfgUfcscsa | 343 | |
| AD-65623.1 | usAfsuAfuUfuCfcAfggaUfgAfaAfgUfcscsa | 344 | |
| AD-65587.1 | usAfsuAfuUfuCfcAfggaUfgAfaAfgUfcscsa | 345 | |
| AD-65593.1 | usAfsuAfuUfuCfcAfggaUfgAfaAfgUfcscsa | 346 | |
| AD-65599.1 | usdAsuauuuccdAggadTgaaagucscsa | 347 | |
| AD-65604.1 | usdAsuauuuccaggadTgaaagucscsa | 348 | |
| AD-65609.1 | usAsuauuuccaggadTgaaagucscsa | 349 | |
| AD-65614.1 | usdAsuaudTuccaggadTgaaagucscsa | 350 | |
| AD-65619.1 | usAsuaudTuccaggadTgaaagucscsa | 351 | |
| AD-65624.1 | usdAsuauuuccaggadTgdAaagucscsa | 352 | |
| AD-65588.1 | usdAsuaudTuccaggadTgdAaagucscsa | 353 | |
| AD-65594.1 | usdAsuauuuccdAggadTgaaagucscsa | 354 | |
| AD-68309.1 | usGfsacaUfcUfUfgaacAfcCfuuucuscsc | 355 | |
| AD-68303.1 | asGfsuuaAfuAfUfauuuCfcAfggaugsasa | 356 | |
| AD-65626.5 | usUfsgucGfaUfGfacuuUfcAfcauucsusg | 357 | |
| AD-68295.1 | usAfsuggGfaAfAfauauUfgUfgcacusgsu | 358 | |
| AD-68273.1 | asAfsuguCfuUfGfucgaUfgAfcuuucsasc | 359 | |
| AD-68297.1 | usUfsuguCfgAfUfgacuUfuCfacauuscsu | 360 | |
| AD-68287.1 | usAfsacaGfuUfAfauauAfuUfuccagsgsa | 361 | |
| AD-68300.1 | asAfsauaAfuAfCfagauGfgGfaaaausasu | 362 | |
| AD-68306.1 | usUfsuugUfuGfGfaaaaGfaAfcgacascsc | 363 | |
| AD-68292.1 | usAfsguuAfaUfAfuauuUfcCfaggausgsa | 364 | |
| AD-68298.1 | usAfsucaUfcAfCfcucuCfaAfaaugcscsc | 365 | |
| AD-68277.1 | usUfsgaaCfaCfCfuuucUfcCfcccugsgsa | 366 | |
| AD-68289.1 | usUfsuaaCfaGfUfuaauAfuAfuuuccsasg | 367 | |
| AD-68272.1 | asAfsggaUfuUfUfuccuCfaCfcaaugsusc | 368 | |
| AD-68282.1 | usAfsucuUfgAfAfcaccUfuUfcucccscsc | 369 | |
| AD-68285.1 | asUfscauCfaCfCfucucAfaAfaugccscsu | 370 | |
| AD-68290.1 | asAfsaagAfaCfGfacacCfcUfuuguasusu | 371 | |
| AD-68296.1 | usGfsauuCfgAfCfaccaAfgAfucccasusu | 372 | |
| AD-68288.1 | usAfsaaaUfaUfUfgugcAfcUfgucagsasu | 373 | |
| AD-68299.1 | asUfsgggAfaAfAfuauuGfuGfcacugsusc | 374 | |
| AD-68275.1 | usUfsaggAfcAfCfccauUfgAfaaaguscsa | 375 | |
| AD-68274.1 | asGfsgauUfuUfUfccucAfcCfaauguscsu | 376 | |
| AD-68294.1 | usCfsauuGfaAfAfagucAfaAfagcaasusg | 377 | |
| AD-68302.1 | usCfsaucAfuCfAfccucUfcAfaaaugscsc | 378 | |
| AD-68279.1 | usGfsacaCfcCfAfuugaAfaAfgucaasasa | 379 | |
| AD-68304.1 | usCfsuguCfcUfAfaaacAfgAfagucgsasc | 380 | |
| AD-68286.1 | usAfsuucUfgGfCfacccAfcUfcagagscsc | 381 | |
| AD-68291.1 | usAfscuuUfcAfCfauucUfgGfcacccsasc | 382 | |
| AD-68283.1 | usGfsuucCfuAfGfgacaCfcCfauugasasa | 383 | |
| AD-68280.1 | usAfsaugUfcUfUfgucgAfuGfacuuuscsa | 384 | |
| AD-68293.1 | usGfscauCfaUfCfaccuCfuCfaaaausgsc | 385 | |
| AD-68276.1 | usCfsucaCfcAfAfugucUfuGfucgausgsa | 386 | |
| AD-68308.1 | usGfsacuUfuCfAfcauuCfuGfgcaccscsa | 387 | |
| AD-68278.1 | usGfsgaaAfaUfAfuuguGfcAfcugucsasg | 388 | |
| AD-68307.1 | usUfscugCfaCfAfguguCfuCfuuuguscsa | 389 | |
| AD-68284.1 | usCfscuaGfgAfCfacccAfuUfgaaaasgsu | 390 | |
| AD-68301.1 | asCfsuguCfaGfAfucuuGfgAfaacggscsc | 391 | |
| AD-68281.1 | usUfsugaAfcAfCfcuuuCfuCfccccusgsg | 392 | |
| AD-68305.1 | asCfscaaUfgUfCfuuguCfgAfugacususu | 393 | |

TABLE 9
Unmodified Human/Mouse/Cyno/Rat, Human/Mouse/Cyno, and Human/Cyno Cross-Reactive
HAO1 iRNA Sequences

| | SEQ | | SEQ | | |
|---|---|---|---|---|---|
| Duplex | ID | | ID | | Position in |
| Name | NO: | Sense Strand Sequence 5′ to 3′ | NO: | Antisense Strand Sequence 5′ to 3′ | NM_017545.2 |
| AD-62933 | 394 | GAAUGUGAAAGUCAUCGACAA | 443 | UUGUCGAUGACUUUCACAUUCUG | 1072-1094 |
| AD-62939 | 395 | UUUUCAAUGGGUGUCCUAGGA | 444 | UCCUAGGACACCCAUUGAAAAGU | 1302-1324 |
| AD-62944 | 396 | GAAAGUCAUCGACAAGACAUU | 445 | AAUGUCUUGUCGAUGACUUUCAC | 1078-1100 |
| AD-62949 | 397 | UCAUCGACAAGACAUUGGUGA | 446 | UCACCAAUGUCUUGUCGAUGACU | 1083-1105 |
| AD-62954 | 398 | UUUCAAUGGGUGUCCUAGGAA | 447 | UUCCUAGGACACCCAUUGAAAAG | 1303-1325 |
| AD-62959 | 399 | AAUGGGUGUCCUAGGAACCUU | 448 | AAGGUUCCUAGGACACCCAUUGA | 1307-1329 |
| AD-62964 | 400 | GACAGUGCACAAUAUUUUCCA | 449 | UGGAAAAUAUUGUGCACUGUCAG | 1134-1156_C21A |
| AD-62969 | 401 | ACUUUUCAAUGGGUGUCCUAA | 450 | UUAGGACACCCAUUGAAAAGUCA | 1300-1322_G21A |
| AD-62934 | 402 | AAGUCAUCGACAAGACAUUGA | 451 | UCAAUGUCUUGUCGAUGACUUUC | 1080-1102_G21A |
| AD-62940 | 403 | AUCGACAAGACAUUGGUGAGA | 452 | UCUCACCAAUGUCUUGUCGAUGA | 1085-1107_G21A |
| AD-62945 | 404 | GGGAGAAAGGUGUUCAAGAUA | 453 | UAUCUUGAACACCUUUCUCCCCC | 996-1018_G21A |
| AD-62950 | 405 | CUUUUCAAUGGGUGUCCUAGA | 454 | UCUAGGACACCCAUUGAAAAGUC | 1301-1323_G21A |
| AD-62955 | 406 | UCAAUGGGUGUCCUAGGAACA | 455 | UGUUCCUAGGACACCCAUUGAAA | 1305-1327_C21A |
| AD-62960 | 407 | UUGACUUUUCAAUGGGUGUCA | 456 | UGACACCCAUUGAAAAGUCAAAA | 1297-1319_C21A |
| AD-62965 | 408 | AAAGUCAUCGACAAGACAUUA | 457 | UAAUGUCUUGUCGAUGACUUUCA | 1079-1101_G21A |
| AD-62970 | 409 | CAGGGGGAGAAAGGUGUUCAA | 458 | UUGAACACCUUUCUCCCCCUGGA | 992-1014 |
| AD-62935 | 410 | CAUUGGUGAGGAAAAAUCCUU | 459 | AAGGAUUUUUCCUCACCAAUGUC | 1095-1117 |
| AD-62941 | 411 | ACAUUGGUGAGGAAAAAUCCU | 460 | AGGAUUUUUCCUCACCAAUGUCU | 1094-1116 |
| AD-62946 | 412 | AGGGGGAGAAAGGUGUUCAAA | 461 | UUUGAACACCUUUCUCCCCCUGG | 993-1015_G21A |
| AD-62974 | 413 | CUCAGGAUGAAAAAUUUUGAA | 462 | UUCAAAAUUUUUCAUCCUGAGUU | 563-585 |
| AD-62978 | 414 | CAGCAUGUAUUACUUGACAAA | 463 | UUUGUCAAGUAAUACAUGCUGAA | 1173-1195 |
| AD-62982 | 415 | UAUGAACAACAUGCUAAAUCA | 464 | UGAUUUAGCAUGUUGUUCAUAAU | 53-75 |
| AD-62986 | 416 | AUAUAUCCAAAUGUUUUAGGA | 465 | UCCUAAAACAUUUGGAUAUAUUC | 1679-1701 |
| AD-62990 | 417 | CCAGAUGGAAGCUGUAUCCAA | 466 | UUGGAUACAGCUUCCAUCUGGAA | 156-178 |
| AD-62994 | 418 | GACUUUCAUCCUGGAAAUAUA | 467 | UAUAUUUCCAGGAUGAAAGUCCA | 1341-1363 |
| AD-62998 | 419 | CCCCGGCUAAUUUGUAUCAAU | 468 | AUUGAUACAAAUUAGCCGGGGGA | 29-51 |
| AD-63002 | 420 | UUAAACAUGGCUUGAAUGGGA | 469 | UCCCAUUCAAGCCAUGUUUAACA | 765-787 |
| AD-62975 | 421 | AAUGUGUUUAGACAACGUCAU | 470 | AUGACGUUGUCUAAACACAUUUU | 1388-1410 |
| AD-62979 | 422 | ACUAAAGGAAGAAUUCCGGUU | 471 | AACCGGAAUUCUUCCUUUAGUAU | 1027-1049 |
| AD-62983 | 423 | UAUAUCCAAAUGUUUUAGGAU | 472 | AUCCUAAAACAUUUGGAUAUAUU | 1680-1702 |
| AD-62987 | 424 | GUGCGGAAAGGCACUGAUGUU | 473 | AACAUCAGUGCCUUUCCGCACAC | 902-924 |
| AD-62991 | 425 | UAAAACAGUGGUUCUUAAAUU | 474 | AAUUUAAGAACCACUGUUUUAAA | 1521-1543 |
| AD-62995 | 426 | AUGAAAAAUUUUGAAACCAGU | 475 | ACUGGUUUCAAAAUUUUUCAUCC | 569-591 |
| AD-62999 | 427 | AACAAAAUAGCAAUCCCUUUU | 476 | AAAAGGGAUUGCUAUUUUGUUGG | 1264-1286 |
| AD-63003 | 428 | CUGAAACAGAUCUGUCGACUU | 477 | AAGUCGACAGAUCUGUUUCAGCA | 195-217 |
| AD-62976 | 429 | UUGUUGCAAAGGGCAUUUUGA | 478 | UCAAAAUGCCCUUUGCAACAAUU | 720-742 |
| AD-62980 | 430 | CUCAUUGUUUAUUAACCUGUA | 479 | UACAGGUUAAUAAACAAUGAGAU | 1483-1505 |
| AD-62984 | 431 | CAACAAAAUAGCAAUCCCUUU | 480 | AAAGGGAUUGCUAUUUUGUUGGA | 1263-1285 |
| AD-62992 | 432 | CAUUGUUUAUUAACCUGUAUU | 481 | AAUACAGGUUAAUAAACAAUGAG | 1485-1507 |
| AD-62996 | 433 | UAUCAGCUGGGAAGAUAUCAA | 482 | UUGAUAUCUUCCCAGCUGAUAGA | 670-692 |
| AD-63000 | 434 | UGUCCUAGGAACCUUUUAGAA | 483 | UUCUAAAAGGUUCCUAGGACACC | 1313-1335 |
| AD-63004 | 435 | UCCAACAAAAUAGCAAUCCCU | 484 | AGGGAUUGCUAUUUUGUUGGAAA | 1261-1283 |
| AD-62977 | 436 | GGUGUGCGGAAAGGCACUGAU | 485 | AUCAGUGCCUUUCCGCACACCCC | 899-921 |
| AD-62981 | 437 | UUGAAACCAGUACUUUAUCAU | 486 | AUGAUAAAGUACUGGUUUCAAAA | 579-601 |
| AD-62985 | 438 | UACUUCCAAAGUCUAUAUAUA | 487 | UAUAUAUAGACUUUGGAAGUACU | 75-97_G21A |
| AD-62989 | 439 | UCCUAGGAACCUUUUAGAAAU | 488 | AUUUCUAAAAGGUUCCUAGGACA | 1315-1337_G21U |
| AD-62993 | 440 | CUCCUGAGGAAAAUUUUGGAA | 489 | UUCCAAAAUUUUCCUCAGGAGAA | 603-625_G21A |
| AD-62997 | 441 | GCUCCGGAAUGUUGCUGAAAU | 490 | AUUUCAGCAACAUUCCGGAGCAU | 181-203_C21U |
| AD-63001 | 442 | GUGUUUGUGGGGAGACCAAUA | 491 | UAUUGGUCUCCCCACAAACACAG | 953-975_C21A |

TABLE 10
Unmodified Mouse and Mouse/Rat HAO1 iRNA Sequences

| | SEQ | | SEQ | | |
|---|---|---|---|---|---|
| Duplex | ID | | ID | | Position in |
| Name | NO: | Sense strand sequence 5′ to 3′ | NO: | Antisense strand sequence 5′ to 3′ | NM_010403.2 |
| AD-62951 | 492 | AUGGUGGUAAUUUGUGAUUUU | 514 | AAAAUCACAAAUUACCACCAUCC | 1642-1664 |
| AD-62956 | 493 | GACUUGCAUCCUGGAAAUAUA | 515 | UAUAUUUCCAGGAUGCAAGUCCA | 1338-1360 |
| AD-62961 | 494 | GGAAGGGAAGGUAGAAGUCUU | 516 | AAGACUUCUACCUUCCCUUCCAC | 864-886 |
| AD-62966 | 495 | UGUCUUCUGUUUAGAUUUCCU | 517 | AGGAAAUCUAAACAGAAGACAGG | 1506-1528 |
| AD-62971 | 496 | CUUUGGCUGUUUCCAAGAUCU | 518 | AGAUCUUGGAAACAGCCAAAGGA | 1109-1131 |
| AD-62936 | 497 | AAUGUGUUUGGGCAACGUCAU | 519 | AUGACGUUGCCCAAACACAUUUU | 1385-1407 |
| AD-62942 | 498 | UGUGACUGUGGACACCCCUUA | 520 | UAAGGGGUGUCCACAGUCACAAA | 486-508 |
| AD-62947 | 499 | GAUGGGGUGCCAGCUACUAUU | 521 | AAUAGUAGCUGGCACCCCAUCCA | 814-836 |
| AD-62952 | 500 | GAAAAUGUGUUUGGGCAACGU | 522 | ACGUUGCCCAAACACAUUUUCAA | 1382-1404 |
| AD-62957 | 501 | GGCUGUUUCCAAGAUCUGACA | 523 | UGUCAGAUCUUGGAAACAGCCAA | 1113-1135 |
| AD-62962 | 502 | UCCAACAAAAUAGCCACCCCU | 524 | AGGGGUGGCUAUUUUGUUGGAAA | 1258-1280 |
| AD-62967 | 503 | GUCUUCUGUUUAGAUUUCCUU | 525 | AAGGAAAUCUAAACAGAAGACAG | 1507-1529 |
| AD-62972 | 504 | UGGAAGGGAAGGUAGAAGUCU | 526 | AGACUUCUACCUUCCCUUCCACA | 863-885 |
| AD-62937 | 505 | UCCUUUGGCUGUUUCCAAGAU | 527 | AUCUUGGAAACAGCCAAAGGAUU | 1107-1129 |
| AD-62943 | 506 | CAUCUCUCAGCUGGGAUGAUA | 528 | UAUCAUCCCAGCUGAGAGAUGGG | 662-684 |
| AD-62948 | 507 | GGGGUGCCAGCUACUAUUGAU | 529 | AUCAAUAGUAGCUGGCACCCCAU | 817-839 |
| AD-62953 | 508 | AUGUGUUUGGGCAACGUCAUA | 530 | UAUGACGUUGCCCAAACACAUUU | 1386-1408_C21A |
| AD-62958 | 509 | CUGUUUAGAUUUCCUUAAGAA | 531 | UUCUUAAGGAAAUCUAAACAGAA | 1512-1534_C21A |
| AD-62963 | 510 | AGAAAGAAAUGGACUUGCAUA | 532 | UAUGCAAGUCCAUUUCUUUCUAG | 1327-1349_C21A |
| AD-62968 | 511 | GCAUCCUGGAAAUAUAUUAAA | 533 | UUUAAUAUAUUUCCAGGAUGCAA | 1343-1365_C21A |
| AD-62973 | 512 | CCUGUCAGACCAUGGGAACUA | 534 | UAGUUCCCAUGGUCUGACAGGCU | 308-330_G21A |
| AD-62938 | 513 | AAACAUGGUGUGGAUGGGAUA | 535 | UAUCCCAUCCACACCAUGUUUAA | 763-785_C21A |

TABLE 11
Additional Unmodified Human/Cyno/Mouse/Rat, Human/Mouse/Cyno, Human/Cyno, and Mouse/Rat

| | SEQ | | | | |
|---|---|---|---|---|---|
| | ID | | SEQ ID | | Position in |
| Duplex Name | NO: | Sense strand sequence 5′ to 3′ | NO: | Antisense strand sequence 5′ to 3′ | NM_017545.2 |
| AD-62933.2 | 394 | GAAUGUGAAAGUCAUCGACAA | 443 | UUGUCGAUGACUUUCACAUUCUG | 1072-1094 |
| AD-62939.2 | 395 | UUUUCAAUGGGUGUCCUAGGA | 444 | UCCUAGGACACCCAUUGAAAAGU | 1302-1324 |
| AD-62944.2 | 396 | GAAAGUCAUCGACAAGACAUU | 445 | AAUGUCUUGUCGAUGACUUUCAC | 1078-1100 |
| AD-62949.2 | 397 | UCAUCGACAAGACAUUGGUGA | 446 | UCACCAAUGUCUUGUCGAUGACU | 1083-1105 |
| AD-62954.2 | 398 | UUUCAAUGGGUGUCCUAGGAA | 447 | UUCCUAGGACACCCAUUGAAAAG | 1303-1325 |
| AD-62959.2 | 399 | AAUGGGUGUCCUAGGAACCUU | 448 | AAGGUUCCUAGGACACCCAUUGA | 1307-1329 |
| AD-62964.2 | 400 | GACAGUGCACAAUAUUUUCCA | 449 | UGGAAAAUAUUGUGCACUGUCAG | 1134-1156_C21A |
| AD-62969.2 | 401 | ACUUUUCAAUGGGUGUCCUAA | 450 | UUAGGACACCCAUUGAAAAGUCA | 1300-1322_G21A |
| AD-62934.2 | 402 | AAGUCAUCGACAAGACAUUGA | 451 | UCAAUGUCUUGUCGAUGACUUUC | 1080-1102_G21A |
| AD-62940.2 | 403 | AUCGACAAGACAUUGGUGAGA | 452 | UCUCACCAAUGUCUUGUCGAUGA | 1085-1107_G21A |
| AD-62945.2 | 404 | GGGAGAAAGGUGUUCAAGAUA | 453 | UAUCUUGAACACCUUUCUCCCCC | 996-1018_G21A |
| AD-62950.2 | 405 | CUUUUCAAUGGGUGUCCUAGA | 454 | UCUAGGACACCCAUUGAAAAGUC | 1301-1323_G21A |
| AD-62955.2 | 406 | UCAAUGGGUGUCCUAGGAACA | 455 | UGUUCCUAGGACACCCAUUGAAA | 1305-1327_C21A |
| AD-62960.2 | 407 | UUGACUUUUCAAUGGGUGUCA | 456 | UGACACCCAUUGAAAAGUCAAAA | 1297-1319_C21A |
| AD-62965.2 | 408 | AAAGUCAUCGACAAGACAUUA | 457 | UAAUGUCUUGUCGAUGACUUUCA | 1079-1101_G21A |
| AD-62970.2 | 409 | CAGGGGGAGAAAGGUGUUCAA | 458 | UUGAACACCUUUCUCCCCCUGGA | 992-1014 |
| AD-62935.2 | 410 | CAUUGGUGAGGAAAAAUCCUU | 459 | AAGGAUUUUUCCUCACCAAUGUC | 1095-1117 |
| AD-62941.2 | 411 | ACAUUGGUGAGGAAAAAUCCU | 460 | AGGAUUUUUCCUCACCAAUGUCU | 1094-1116 |
| AD-62946.2 | 412 | AGGGGGAGAAAGGUGUUCAAA | 461 | UUUGAACACCUUUCUCCCCCUGG | 993-1015_G21A |
| AD-62974.2 | 413 | CUCAGGAUGAAAAAUUUUGAA | 462 | UUCAAAAUUUUUCAUCCUGAGUU | 563-585 |
| AD-62978.2 | 414 | CAGCAUGUAUUACUUGACAAA | 463 | UUUGUCAAGUAAUACAUGCUGAA | 1173-1195 |
| AD-62982.2 | 415 | UAUGAACAACAUGCUAAAUCA | 464 | UGAUUUAGCAUGUUGUUCAUAAU | 53-75 |
| AD-62986.2 | 416 | AUAUAUCCAAAUGUUUUAGGA | 465 | UCCUAAAACAUUUGGAUAUAUUC | 1679-1701 |
| AD-62990.2 | 417 | CCAGAUGGAAGCUGUAUCCAA | 466 | UUGGAUACAGCUUCCAUCUGGAA | 156-178 |
| AD-62994.2 | 418 | GACUUUCAUCCUGGAAAUAUA | 467 | UAUAUUUCCAGGAUGAAAGUCCA | 1341-1363 |
| AD-62998.2 | 419 | CCCCGGCUAAUUUGUAUCAAU | 468 | AUUGAUACAAAUUAGCCGGGGGA | 29-51 |
| AD-63002.2 | 420 | UUAAACAUGGCUUGAAUGGGA | 469 | UCCCAUUCAAGCCAUGUUUAACA | 765-787 |
| AD-62975.2 | 421 | AAUGUGUUUAGACAACGUCAU | 470 | AUGACGUUGUCUAAACACAUUUU | 1388-1410 |
| AD-62979.2 | 422 | ACUAAAGGAAGAAUUCCGGUU | 471 | AACCGGAAUUCUUCCUUUAGUAU | 1027-1049 |
| AD-62983.2 | 423 | UAUAUCCAAAUGUUUUAGGAU | 472 | AUCCUAAAACAUUUGGAUAUAUU | 1680-1702 |
| AD-62987.2 | 424 | GUGCGGAAAGGCACUGAUGUU | 473 | AACAUCAGUGCCUUUCCGCACAC | 902-924 |
| AD-62991.2 | 425 | UAAAACAGUGGUUCUUAAAUU | 474 | AAUUUAAGAACCACUGUUUUAAA | 1521-1543 |
| AD-62995.2 | 426 | AUGAAAAAUUUUGAAACCAGU | 475 | ACUGGUUUCAAAAUUUUUCAUCC | 569-591 |
| AD-62999.2 | 427 | AACAAAAUAGCAAUCCCUUUU | 476 | AAAAGGGAUUGCUAUUUUGUUGG | 1264-1286 |
| AD-63003.2 | 428 | CUGAAACAGAUCUGUCGACUU | 477 | AAGUCGACAGAUCUGUUUCAGCA | 195-217 |
| AD-62976.2 | 429 | UUGUUGCAAAGGGCAUUUUGA | 478 | UCAAAAUGCCCUUUGCAACAAUU | 720-742 |
| AD-62980.2 | 430 | CUCAUUGUUUAUUAACCUGUA | 479 | UACAGGUUAAUAAACAAUGAGAU | 1483-1505 |
| AD-62984.2 | 431 | CAACAAAAUAGCAAUCCCUUU | 480 | AAAGGGAUUGCUAUUUUGUUGGA | 1263-1285 |
| AD-62992.2 | 432 | CAUUGUUUAUUAACCUGUAUU | 481 | AAUACAGGUUAAUAAACAAUGAG | 1485-1507 |
| AD-62996.2 | 433 | UAUCAGCUGGGAAGAUAUCAA | 482 | UUGAUAUCUUCCCAGCUGAUAGA | 670-692 |
| AD-63000.2 | 434 | UGUCCUAGGAACCUUUUAGAA | 483 | UUCUAAAAGGUUCCUAGGACACC | 1313-1335 |
| AD-63004.2 | 435 | UCCAACAAAAUAGCAAUCCCU | 484 | AGGGAUUGCUAUUUUGUUGGAAA | 1261-1283 |
| AD-62977.2 | 436 | GGUGUGCGGAAAGGCACUGAU | 485 | AUCAGUGCCUUUCCGCACACCCC | 899-921 |
| AD-62981.2 | 437 | UUGAAACCAGUACUUUAUCAU | 486 | AUGAUAAAGUACUGGUUUCAAAA | 579-601 |
| AD-62985.2 | 438 | UACUUCCAAAGUCUAUAUAUA | 487 | UAUAUAUAGACUUUGGAAGUACU | 75-97_G21A |
| AD-62989.2 | 439 | UCCUAGGAACCUUUUAGAAAU | 488 | AUUUCUAAAAGGUUCCUAGGACA | 1315-1337_G21U |
| AD-62993.2 | 440 | CUCCUGAGGAAAAUUUUGGAA | 489 | UUCCAAAAUUUUCCUCAGGAGAA | 603-625_G21A |
| AD-62997.2 | 441 | GCUCCGGAAUGUUGCUGAAAU | 490 | AUUUCAGCAACAUUCCGGAGCAU | 181-203_C21U |
| AD-63001.2 | 442 | GUGUUUGUGGGGAGACCAAUA | 491 | UAUUGGUCUCCCCACAAACACAG | 953-975_C21A |
| AD-62951.2 | 492 | AUGGUGGUAAUUUGUGAUUUU | 514 | AAAAUCACAAAUUACCACCAUCC | 1642-1664 |
| AD-62956.2 | 493 | GACUUGCAUCCUGGAAAUAUA | 515 | UAUAUUUCCAGGAUGCAAGUCCA | 1338-1360 |
| AD-62961.2 | 494 | GGAAGGGAAGGUAGAAGUCUU | 516 | AAGACUUCUACCUUCCCUUCCAC | 864-886 |
| AD-62966.2 | 495 | UGUCUUCUGUUUAGAUUUCCU | 517 | AGGAAAUCUAAACAGAAGACAGG | 1506-1528 |
| AD-62971.2 | 496 | CUUUGGCUGUUUCCAAGAUCU | 518 | AGAUCUUGGAAACAGCCAAAGGA | 1109-1131 |
| AD-62936.2 | 497 | AAUGUGUUUGGGCAACGUCAU | 519 | AUGACGUUGCCCAAACACAUUUU | 1385-1407 |
| AD-62942.2 | 498 | UGUGACUGUGGACACCCCUUA | 520 | UAAGGGGUGUCCACAGUCACAAA | 486-508 |
| AD-62947.2 | 499 | GAUGGGGUGCCAGCUACUAUU | 521 | AAUAGUAGCUGGCACCCCAUCCA | 814-836 |
| AD-62952.2 | 500 | GAAAAUGUGUUUGGGCAACGU | 522 | ACGUUGCCCAAACACAUUUUCAA | 1382-1404 |
| AD-62957.2 | 501 | GGCUGUUUCCAAGAUCUGACA | 523 | UGUCAGAUCUUGGAAACAGCCAA | 1113-1135 |
| AD-62962.2 | 502 | UCCAACAAAAUAGCCACCCCU | 524 | AGGGGUGGCUAUUUUGUUGGAAA | 1258-1280 |
| AD-62967.2 | 503 | GUCUUCUGUUUAGAUUUCCUU | 525 | AAGGAAAUCUAAACAGAAGACAG | 1507-1529 |
| AD-62972.2 | 504 | UGGAAGGGAAGGUAGAAGUCU | 526 | AGACUUCUACCUUCCCUUCCACA | 863-885 |
| AD-62937.2 | 505 | UCCUUUGGCUGUUUCCAAGAU | 527 | AUCUUGGAAACAGCCAAAGGAUU | 1107-1129 |
| AD-62943.2 | 506 | CAUCUCUCAGCUGGGAUGAUA | 528 | UAUCAUCCCAGCUGAGAGAUGGG | 662-684 |
| AD-62948.2 | 507 | GGGGUGCCAGCUACUAUUGAU | 529 | AUCAAUAGUAGCUGGCACCCCAU | 817-839 |
| AD-62953.2 | 508 | AUGUGUUUGGGCAACGUCAUA | 530 | UAUGACGUUGCCCAAACACAUUU | 1386-1408_C21A |
| AD-62958.2 | 509 | CUGUUUAGAUUUCCUUAAGAA | 531 | UUCUUAAGGAAAUCUAAACAGAA | 1512-1534_C21A |
| AD-62963.2 | 510 | AGAAAGAAAUGGACUUGCAUA | 532 | UAUGCAAGUCCAUUUCUUUCUAG | 1327-1349_C21A |
| AD-62968.2 | 511 | GCAUCCUGGAAAUAUAUUAAA | 533 | UUUAAUAUAUUUCCAGGAUGCAA | 1343-1365_C21A |
| AD-62973.2 | 512 | CCUGUCAGACCAUGGGAACUA | 534 | UAGUUCCCAUGGUCUGACAGGCU | 308-330_G21A |
| AD-62938.2 | 513 | AAACAUGGUGUGGAUGGGAUA | 535 | UAUCCCAUCCACACCAUGUUUAA | 763-785_C21A |
| AD-62933.1 | 536 | GAAUGUGAAAGUCAUCGACAA | 653 | UUGUCGAUGACUUUCACAUUCUG | 1072-1094 |
| AD-65630.1 | 537 | GAAUGUGAAAGUCAUCGACAA | 654 | UUGUCGAUGACUUUCACAUUCUG | 1072-1094 |
| AD-65636.1 | 538 | GAAUGUGAAAGUCAUCGACAA | 655 | UUGUCGAUGACUUUCACAUUCUG | 1072-1094 |
| AD-65642.1 | 539 | GAAUGUGAAAGUCAUCGACAA | 656 | UUGUCGAUGACUUUCACAUUCUG | 1072-1094 |
| AD-65647.1 | 540 | GAAUGUGAAAGUCAUCGACAA | 657 | UUGUCGAUGACUUUCACAUUCUG | 1072-1094 |
| AD-65652.1 | 541 | GAAUGUGAAAGUCAUCGACAA | 658 | UUGUCGAUGACUUUCACAUUCUG | 1072-1094 |
| AD-65657.1 | 542 | GAAUGUGAAAGUCAUCGACAA | 659 | UUGUCGAUGACUUUCACAUUCUG | 1072-1094 |
| AD-65662.1 | 543 | GAAUGUGAAAGUCAUCGACAA | 660 | UUGUCGAUGACUUUCACAUUCUG | 1072-1094 |
| AD-65625.1 | 544 | AUGUGAAAGUCAUCGACAA | 661 | UUGUCGAUGACUUUCACAUUC | 1072-1094 |
| AD-65631.1 | 545 | AUGUGAAAGUCAUCGACAA | 662 | UUGUCGAUGACUUUCACAUUC | 1072-1094 |
| AD-65637.1 | 546 | GAAUGUGAAAGUCAUCGACAA | 663 | UUGUCGAUGACUUUCACAUUCUG | 1072-1094 |
| AD-65643.1 | 547 | GAAUGUGAAAGUCAUCGACAA | 664 | UUGUCGAUGACUUUCACAUUCUG | 1072-1094 |
| AD-65648.1 | 548 | GAAUGUGAAAGUCAUCGACAA | 665 | UUGUCGAUGACUUUCACAUUCUG | 1072-1094 |
| AD-65653.1 | 549 | GAAUGUGAAAGUCAUCGACAA | 666 | UUGUCGAUGACUUUCACAUUCUG | 1072-1094 |
| AD-65658.1 | 550 | GAAUGUGAAAGUCAUCGACAA | 667 | UUGUCGAUGACUUUCACAUUCUG | 1072-1094 |
| AD-65663.1 | 551 | GAAUGUGAAAGUCAUCGACAA | 668 | UUGUCGAUGACUUUCACAUUCUG | 1072-1094 |
| AD-65626.1 | 552 | GAAUGUGAAAGUCAUCGACAA | 669 | UUGUCGAUGACUUUCACAUUCUG | 1072-1094 |
| AD-65638.1 | 553 | GAAUGUGAAAGUCAUCGACAA | 670 | UUGUCGAUGACUUUCACAUUCUG | 1072-1094 |
| AD-65644.1 | 554 | GAAUGUGAAAGUCAUCGACAA | 671 | UUGUCGAUGACUUUCACAUUCUG | 1072-1094 |
| AD-65649.1 | 555 | GAAUGUGAAAGUCAUCGACAA | 672 | UUGUCGAUGACUUUCACAUUCUG | 1072-1094 |
| AD-65654.1 | 556 | GAAUGUGAAAGUCAUCGACAA | 673 | UUGUCGAUGACUUUCACAUUCUG | 1072-1094 |
| AD-65659.1 | 557 | GAAUGTGAAAGUCAUCGACAA | 674 | UUGUCGAUGACUUUCACAUUCUG | 1072-1094 |
| AD-65627.1 | 558 | GAAUGUGAAAGUCAUCGACAA | 675 | UUGUCGAUGACUUUCACAUUCUG | 1072-1094 |
| AD-65633.1 | 559 | GAAUGTGAAAGUCAUCGACAA | 676 | UUGUCGAUGACUUUCACAUUCUG | 1072-1094 |
| AD-65639.1 | 560 | GAAUGUGAAAGUCAUCGACAA | 677 | UUGUCGAUGACUUUCACAUUCUG | 1072-1094 |
| AD-65645.1 | 561 | GAAUGUGAAAGUCAUCGACAA | 678 | UUGUCGAUGACUUUCACAUUCUG | 1072-1094 |
| AD-65650.1 | 562 | GAAUGUGAAAGUCAUCTACAA | 679 | UUGUCGAUGACUUUCACAUUCUG | 1072-1094 |
| AD-65655.1 | 563 | GAAUGUGAAAGUCAUCACAA | 680 | UUGUCGAUGACUUUCACAUUCUG | 1072-1094 |
| AD-65660.1 | 564 | GAAUGUGAAAGUCATCTACAA | 681 | UUGUCGAUGACUUUCACAUUCUG | 1072-1094 |
| AD-65665.1 | 565 | GAAUGUGAAAGUCAUCGACAA | 682 | UUGUCGAUGACUUUCACAUUCUG | 1072-1094 |
| AD-65628.1 | 566 | GAAUGUGAAAGUCAUCTACAA | 683 | UUGUCGAUGACUUUCACAUUCUG | 1072-1094 |
| AD-65634.1 | 567 | GAAUGUGAAAGUCAUCACAA | 684 | UUGUCGAUGACUUUCACAUUCUG | 1072-1094 |
| AD-65646.1 | 568 | GAAUGUGAAAGUCAUCGACAA | 685 | UTGUCGAUGACUUTCACAUUCUG | 1072-1094 |
| AD-65656.1 | 569 | GAAUGUGAAAGUCAUCGACAA | 686 | UUGUCGAUGACUUTCACAUUCUG | 1072-1094 |
| AD-65661.1 | 570 | GAAUGUGAAAGUCAUCGACAA | 687 | UTGUCGAUGACUUTCACAUUCUG | 1072-1094 |
| AD-65666.1 | 571 | GAAUGUGAAAGUCAUCGACAA | 688 | UUGUCGAUGACUUTCACAUUCUG | 1072-1094 |
| AD-65629.1 | 572 | GAAUGUGAAAGUCAUCGACAA | 689 | UTGUCGAUGACUUTCACAUUCUG | 1072-1094 |
| AD-65635.1 | 573 | GAAUGUGAAAGUCAUCGACAA | 690 | UTGUCGAUGACUUTCACAUUCUG | 1072-1094 |
| AD-65641.1 | 574 | GAAUGUGAAAGUCAUCGACAA | 691 | UTGUCGAUGACUUTCACAUUCUG | 1072-1094 |
| AD-62994.1 | 575 | GACUUUCAUCCUGGAAAUAUA | 692 | UAUAUUUCCAGGAUGAAAGUCCA | 1341-1363 |
| AD-65595.1 | 576 | GACUUUCAUCCUGGAAAUAUA | 693 | UAUAUUUCCAGGAUGAAAGUCCA | 1341-1363 |
| AD-65600.1 | 577 | GACUUUCAUCCUGGAAAUAUA | 694 | UAUAUUUCCAGGAUGAAAGUCCA | 1341-1363 |
| AD-65610.1 | 578 | GACUUUCAUCCUGGAAAUAUA | 695 | UAUAUUUCCAGGAUGAAAGUCCA | 1341-1363 |
| AD-65615.1 | 579 | GACUUUCAUCCUGGAAAUAUA | 696 | UAUAUUUCCAGGAUGAAAGUCCA | 1341-1363 |
| AD-65620.1 | 580 | GACUUUCAUCCUGGAAAUAUA | 697 | UAUAUUUCCAGGAUGAAAGUCCA | 1341-1363 |
| AD-65584.1 | 581 | CUUUCAUCCUGGAAAUAUA | 698 | UAUAUUUCCAGGAUGAAAGUC | 1341-1361 |
| AD-65590.1 | 582 | CUUUCAUCCUGGAAAUAUA | 699 | UAUAUUUCCAGGAUGAAAGUC | 1341-1361 |
| AD-65596.1 | 583 | GACUUUCAUCCUGGAAAUAUA | 700 | UAUAUUUCCAGGAUGAAAGUCCA | 1341-1363 |
| AD-65601.1 | 584 | GACUUUCAUCCUGGAAAUAUA | 701 | UAUAUUUCCAGGAUGAAAGUCCA | 1341-1363 |
| AD-65606.1 | 585 | GACUUUCAUCCUGGAAAUAUA | 702 | UAUAUUUCCAGGAUGAAAGUCCA | 1341-1363 |
| AD-65611.1 | 586 | GACUUUCAUCCUGGAAAUAUA | 703 | UAUAUUUCCAGGAUGAAAGUCCA | 1341-1363 |
| AD-65616.1 | 587 | GACUUUCAUCCUGGAAAUAUA | 704 | UAUAUUUCCAGGAUGAAAGUCCA | 1341-1363 |
| AD-65621.1 | 588 | GACUUUCAUCCUGGAAAUAUA | 705 | UAUAUUUCCAGGAUGAAAGUCCA | 1341-1363 |
| AD-65585.1 | 589 | GACUUUCAUCCUGGAAAUAUA | 706 | UAUAUUUCCAGGAUGAAAGUCCA | 1341-1363 |
| AD-65591.1 | 590 | GACUUUCAUCCUGGAAAUAUA | 707 | UAUAUUUCCAGGAUGAAAGUCCA | 1341-1363 |
| AD-65597.1 | 591 | GACUUUCAUCCUGGAAAUAUA | 708 | UAUAUUUCCAGGAUGAAAGUCCA | 1341-1363 |
| AD-65602.1 | 592 | GACUUUCAUCCUGGAAAUAUA | 709 | UAUAUUUCCAGGAUGAAAGUCCA | 1341-1363 |
| AD-65607.1 | 593 | GACUUUCAUCCUGGAAAUAUA | 710 | UAUAUUUCCAGGAUGAAAGUCCA | 1341-1363 |
| AD-65612.1 | 594 | GACUUUCAUCCUGGAAAUAUA | 711 | UAUAUUUCCAGGAUGAAAGUCCA | 1341-1363 |
| AD-65622.1 | 595 | GACUUUCAUCCUGGAAAUAUA | 712 | UAUAUUUCCAGGAUGAAAGUCCA | 1341-1363 |
| AD-65586.1 | 596 | GACUTUCAUCCUGGAAAUAUA | 713 | UAUAUUUCCAGGAUGAAAGUCCA | 1341-1363 |
| AD-65592.1 | 597 | GACUUTCAUCCUGGAAAUAUA | 714 | UAUAUUUCCAGGAUGAAAGUCCA | 1341-1363 |
| AD-65598.1 | 598 | GACUUUCAUCCUGGAAAUAUA | 715 | UAUAUUUCCAGGAUGAAAGUCCA | 1341-1363 |
| AD-65603.1 | 599 | GACUUUCAUCCUGGAAAUAUA | 716 | UAUAUUUCCAGGAUGAAAGUCCA | 1341-1363 |
| AD-65608.1 | 600 | GACUUUCAUCCUGGAATUAUA | 717 | UAUAUUUCCAGGAUGAAAGUCCA | 1341-1363 |
| AD-65613.1 | 601 | GACUUUCAUCCUGGAAUAUA | 718 | UAUAUUUCCAGGAUGAAAGUCCA | 1341-1363 |
| AD-65618.1 | 602 | GACUUUCAUCCUGGAATUAUA | 719 | UAUAUUUCCAGGAUGAAAGUCCA | 1341-1363 |
| AD-65623.1 | 603 | GACUUUCAUCCUGGAATUAUA | 720 | UAUAUUUCCAGGAUGAAAGUCCA | 1341-1363 |
| AD-65587.1 | 604 | GACUUUCAUCCUGGAAAUAUA | 721 | UAUAUUUCCAGGAUGAAAGUCCA | 1341-1363 |
| AD-65593.1 | 605 | GACUUTCAUCCUGGAAAUAUA | 722 | UAUAUUUCCAGGAUGAAAGUCCA | 1341-1363 |
| AD-65599.1 | 606 | GACUUUCAUCCUGGAAAUAUA | 723 | UAUAUUUCCAGGATGAAAGUCCA | 1341-1363 |
| AD-65604.1 | 607 | GACUUUCAUCCUGGAAAUAUA | 724 | UAUAUUUCCAGGATGAAAGUCCA | 1341-1363 |
| AD-65609.1 | 608 | GACUUUCAUCCUGGAAAUAUA | 725 | UAUAUUUCCAGGATGAAAGUCCA | 1341-1363 |
| AD-65614.1 | 609 | GACUUUCAUCCUGGAAAUAUA | 726 | UAUAUTUCCAGGATGAAAGUCCA | 1341-1363 |
| AD-65619.1 | 610 | GACUUUCAUCCUGGAAAUAUA | 727 | UAUAUTUCCAGGATGAAAGUCCA | 1341-1363 |
| AD-65624.1 | 611 | GACUUUCAUCCUGGAAAUAUA | 728 | UAUAUUUCCAGGATGAAAGUCCA | 1341-1363 |
| AD-65588.1 | 612 | GACUUUCAUCCUGGAAAUAUA | 729 | UAUAUTUCCAGGATGAAAGUCCA | 1341-1363 |
| AD-65594.1 | 613 | GACUUUCAUCCUGGAAAUAUA | 730 | UAUAUUUCCAGGATGAAAGUCCA | 1341-1363 |
| AD-68309.1 | 614 | AGAAAGGUGUUCAAGAUGUCA | 731 | UGACAUCUUGAACACCUUUCUCC | 1001-1022_C21A |
| AD-68303.1 | 615 | CAUCCUGGAAAUAUAUUAACU | 732 | AGUUAAUAUAUUUCCAGGAUGAA | 1349-1370 |
| AD-65626.5 | 616 | GAAUGUGAAAGUCAUCGACAA | 733 | UUGUCGAUGACUUUCACAUUCUG | 1072-1094 |
| AD-68295.1 | 617 | AGUGCACAAUAUUUUCCCAUA | 734 | UAUGGGAAAAUAUUGUGCACUGU | 1139-1160_C21A |
| AD-68273.1 | 618 | GAAAGUCAUCGACAAGACAUU | 735 | AAUGUCUUGUCGAUGACUUUCAC | 1080-1100 |
| AD-68297.1 | 619 | AAUGUGAAAGUCAUCGACAAA | 736 | UUUGUCGAUGACUUUCACAUUCU | 1075-1096_G21A |
| AD-68287.1 | 620 | CUGGAAAUAUAUUAACUGUUA | 737 | UAACAGUUAAUAUAUUUCCAGGA | 1353-1374 |
| AD-68300.1 | 621 | AUUUUCCCAUCUGUAUUAUUU | 738 | AAAUAAUACAGAUGGGAAAAUAU | 1149-1170 |
| AD-68306.1 | 622 | UGUCGUUCUUUUCCAACAAAA | 739 | UUUUGUUGGAAAAGAACGACACC | 1252-1273 |
| AD-68292.1 | 623 | AUCCUGGAAAUAUAUUAACUA | 740 | UAGUUAAUAUAUUUCCAGGAUGA | 1350-1371_G21A |
| AD-68298.1 | 624 | GCAUUUUGAGAGGUGAUGAUA | 741 | UAUCAUCACCUCUCAAAAUGCCC | 734-755_G21A |
| AD-68277.1 | 625 | CAGGGGGAGAAAGGUGUUCAA | 742 | UUGAACACCUUUCUCCCCCUGGA | 994-1014 |
| AD-68289.1 | 626 | GGAAAUAUAUUAACUGUUAAA | 743 | UUUAACAGUUAAUAUAUUUCCAG | 1355-1376 |
| AD-68272.1 | 627 | CAUUGGUGAGGAAAAAUCCUU | 744 | AAGGAUUUUUCCUCACCAAUGUC | 1097-1117 |
| AD-68282.1 | 628 | GGGAGAAAGGUGUUCAAGAUA | 745 | UAUCUUGAACACCUUUCUCCCCC | 998-1018_G21A |
| AD-68285.1 | 629 | GGCAUUUUGAGAGGUGAUGAU | 746 | AUCAUCACCUCUCAAAAUGCCCU | 733-754 |
| AD-68290.1 | 630 | UACAAAGGGUGUCGUUCUUUU | 747 | AAAAGAACGACACCCUUUGUAUU | 1243-1264 |
| AD-68296.1 | 631 | UGGGAUCUUGGUGUCGAAUCA | 748 | UGAUUCGACACCAAGAUCCCAUU | 783-804 |
| AD-68288.1 | 632 | CUGACAGUGCACAAUAUUUUA | 749 | UAAAAUAUUGUGCACUGUCAGAU | 1134-1155_C21A |
| AD-68299.1 | 633 | CAGUGCACAAUAUUUUCCCAU | 750 | AUGGGAAAAUAUUGUGCACUGUC | 1138-1159 |
| AD-68275.1 | 634 | ACUUUUCAAUGGGUGUCCUAA | 751 | UUAGGACACCCAUUGAAAAGUCA | 1302-1322_G21A |
| AD-68274.1 | 635 | ACAUUGGUGAGGAAAAAUCCU | 752 | AGGAUUUUUCCUCACCAAUGUCU | 1096-1116 |
| AD-68294.1 | 636 | UUGCUUUUGACUUUUCAAUGA | 753 | UCAUUGAAAAGUCAAAAGCAAUG | 1293-1314_G21A |
| AD-68302.1 | 637 | CAUUUUGAGAGGUGAUGAUGA | 754 | UCAUCAUCACCUCUCAAAAUGCC | 735-756_C21A |
| AD-68279.1 | 638 | UUGACUUUUCAAUGGGUGUCA | 755 | UGACACCCAUUGAAAAGUCAAAA | 1299-1319_C21A |
| AD-68304.1 | 639 | CGACUUCUGUUUUAGGACAGA | 756 | UCUGUCCUAAAACAGAAGUCGAC | 212-233 |
| AD-68286.1 | 640 | CUCUGAGUGGGUGCCAGAAUA | 757 | UAUUCUGGCACCCACUCAGAGCC | 1058-1079_G21A |
| AD-68291.1 | 641 | GGGUGCCAGAAUGUGAAAGUA | 758 | UACUUUCACAUUCUGGCACCCAC | 1066-1087_C21A |
| AD-68283.1 | 642 | UCAAUGGGUGUCCUAGGAACA | 759 | UGUUCCUAGGACACCCAUUGAAA | 1307-1327_C21A |
| AD-68280.1 | 643 | AAAGUCAUCGACAAGACAUUA | 760 | UAAUGUCUUGUCGAUGACUUUCA | 1081-1101_G21A |
| AD-68293.1 | 644 | AUUUUGAGAGGUGAUGAUGCA | 761 | UGCAUCAUCACCUCUCAAAAUGC | 736-757_C21A |
| AD-68276.1 | 645 | AUCGACAAGACAUUGGUGAGA | 762 | UCUCACCAAUGUCUUGUCGAUGA | 1087-1107_G21A |
| AD-68308.1 | 646 | GGUGCCAGAAUGUGAAAGUCA | 763 | UGACUUUCACAUUCUGGCACCCA | 1067-1088 |
| AD-68278.1 | 647 | GACAGUGCACAAUAUUUUCCA | 764 | UGGAAAAUAUUGUGCACUGUCAG | 1136-1156_C21A |
| AD-68307.1 | 648 | ACAAAGAGACACUGUGCAGAA | 765 | UUCUGCACAGUGUCUCUUUGUCA | 1191-1212_G21A |
| AD-68284.1 | 649 | UUUUCAAUGGGUGUCCUAGGA | 766 | UCCUAGGACACCCAUUGAAAAGU | 1304-1324 |
| AD-68301.1 | 650 | CCGUUUCCAAGAUCUGACAGU | 767 | ACUGUCAGAUCUUGGAAACGGCC | 1121-1142 |
| AD-68281.1 | 651 | AGGGGGAGAAAGGUGUUCAAA | 768 | UUUGAACACCUUUCUCCCCCUGG | 995-1015_G21A |
| AD-68305.1 | 652 | AGUCAUCGACAAGACAUUGGU | 769 | ACCAAUGUCUUGUCGAUGACUUU | 1083-1104 |

TABLE 12
Additional Human/Mouse/Cyno HAO1 Modified and Unmodified Sense Strand iRNA Sequences

| | | Unmodified sense strand sequence | |
|---|---|---|---|
| Duplex Name | Modified sense strand sequence 5′ to 3′ | 5′ to 3′ | SEQ ID NO: |
| AD-40257.1 | uucAAuGGGuGuccuAGGAdTsdT | UUCAAUGGGUGUCCUAGGA | 770 & 771 |
| AD-40257.2 | uucAAuGGGuGuccuAGGAdTsdT | UUCAAUGGGUGUCCUAGGA | 770 & 771 |
| AD-63102.1 | AcAAcuGGAGGGAcAucGudTsdT | ACAACUGGAGGGACAUCGU | 772 & 773 |
| AD-63102.2 | AcAAcuGGAGGGAcAucGudTsdT | ACAACUGGAGGGACAUCGU | 772 & 773 |
| AD-63102.3 | AcAAcuGGAGGGAcAucGudTsdT | ACAACUGGAGGGACAUCGU | 772 & 773 |

TABLE 13
Additional Human/Mouse/
Cyno HAO1 Modified and Unmodified Antisense Strand iRNA Sequences

| | Modified antisense strand sequence 5′ | Unmodified antisense strand | |
|---|---|---|---|
| Duplex Name | to 3′ | sequence 5′ to 3′ | SEQ ID NO: |
| AD-40257.1 | UCCuAGGAcACCcAUUGAAdTsdT | UCCUAGGACACCCAUUGAA | 774 & 775 |
| AD-40257.2 | UCCuAGGAcACCcAUUGAAdTsdT | UCCUAGGACACCCAUUGAA | 774 & 775 |
| AD-63102.1 | ACGAUGUCCCUCcAGUUGUdTsdT | ACGAUGUCCCUCCAGUUGU | 776 & 777 |
| AD-63102.2 | ACGAUGUCCCUCcAGUUGUdTsdT | ACGAUGUCCCUCCAGUUGU | 776 & 777 |
| AD-63102.3 | ACGAUGUCCCUCcAGUUGUdTsdT | ACGAUGUCCCUCCAGUUGU | 776 & 777 |

TABLE 14
Additional Human/Cyno/Mouse/Rat and Human/Cyno/
Rat HAO1 Modified Sense Strand iRNA Sequences

| Duplex Name | Modified sense strand sequence | SEQ ID NO: |
|---|---|---|
| AD-62989.2 | UfscsCfuAfgGfaAfCfCfuUfuUfaGfaAfaUfL96 | 778 |
| AD-62994.2 | GfsasCfuUfuCfaUfCfCfuGfgAfaAfuAfuAfL96 | 779 |
| AD-62933.2 | GfsasAfuGfuGfaAfAfGfuCfaUfcGfaCfaAfL96 | 780 |
| AD-62935.2 | CfsasUfuGfgUfgAfGfGfaAfaAfaUfcCfuUfL96 | 781 |
| AD-62940.2 | AfsusCfgAfcAfaGfAfCfaUfuGfgUfgAfgAfL96 | 782 |
| AD-62941.2 | AfscsAfuUfgGfuGfAfGfgAfaAfaAfuCfcUfL96 | 783 |
| AD-62944.2 | GfsasAfaGfuCfaUfCfGfaCfaAfgAfcAfuUfL96 | 784 |
| AD-62965.2 | AfsasAfgUfcAfuCfGfAfcAfaGfaCfaUfuAfL96 | 785 |

TABLE 15
Additional Human/Cyno/Mouse/Rat and Human/Cyno/
Rat HAO1 Modified Antisense Strand iRNA Sequences

| | | SEQ |
|---|---|---|
| | | ID |
| Duplex Name | Modified antisense strand | NO: |
| AD-62989.2 | asUfsuUfcUfaAfaAfgguUfcCfuAfgGfascsa | 786 |
| AD-62994.2 | usAfsuAfuUfuCfcAfggaUfgAfaAfgUfcscsa | 787 |
| AD-62933.2 | usUfsgUfcGfaUfgAfcuuUfcAfcAfuUfcsusg | 788 |
| AD-62935.2 | asAfsgGfaUfuUfuUfccuCfaCfcAfaUfgsusc | 789 |
| AD-62940.2 | usCfsuCfaCfcAfaUfgucUfuGfuCfgAfusgsa | 790 |
| AD-62941.2 | asGfsgAfuUfuUfuCfcucAfcCfaAfuGfuscsu | 791 |
| AD-62944.2 | asAfsuGfuCfuUfgUfcgaUfgAfcUfuUfcsasc | 792 |
| AD-62965.2 | usAfsaUfgUfcUfuGfucgAfuGfaCfuUfuscsa | 793 |

TABLE 16
Additional Human Unmodified and Modifieded Sense and Antisense Strand
HAO1 iRNA Sequences Targeting NM_017545.2

| | SEQ ID | | SEQ ID | | |
|---|---|---|---|---|---|
| Unmodified sequence 5′ to 3′ | NO: | Modified sequence 5′ to 3′ | NO: | Strand | Length |
| AUGUAUGUUACUUCUUAGAGA | 794 | asusguauGfuUfAfCfuucuuagagaL96 | 1890 | sense | 21 |
| UCUCUAAGAAGUAACAUACAUCC | 795 | usCfsucuAfaGfAfaguaAfcAfuacauscsc | 1891 | antisense | 23 |
| UGUAUGUUACUUCUUAGAGAG | 796 | usgsuaugUfuAfCfUfucuuagagagL96 | 1892 | sense | 21 |
| CUCUCUAAGAAGUAACAUACAUC | 797 | csUfscucUfaAfGfaaguAfaCfauacasusc | 1893 | antisense | 23 |
| UAGGAUGUAUGUUACUUCUUA | 798 | usasggauGfuAfUfGfuuacuucuuaL96 | 1894 | sense | 21 |
| UAAGAAGUAACAUACAUCCUAAA | 799 | usAfsagaAfgUfAfacauAfcAfuccuasasa | 1895 | antisense | 23 |
| UUAGGAUGUAUGUUACUUCUU | 800 | ususaggaUfgUfAfUfguuacuucuuL96 | 1896 | sense | 21 |
| AAGAAGUAACAUACAUCCUAAAA | 801 | asAfsgaaGfuAfAfcauaCfaUfccuaasasa | 1897 | antisense | 23 |
| AGAAAGGUGUUCAAGAUGUCC | 802 | asgsaaagGfuGfUfUfcaagauguccL96 | 1898 | sense | 21 |
| GGACAUCUUGAACACCUUUCUCC | 803 | gsGfsacaUfcUfUfgaacAfcCfuuucuscsc | 1899 | antisense | 23 |
| GAAAGGUGUUCAAGAUGUCCU | 804 | gsasaaggUfgUfUfCfaagauguccuL96 | 1900 | sense | 21 |
| AGGACAUCUUGAACACCUUUCUC | 805 | asGfsgacAfuCfUfugaaCfaCfcuuucsusc | 1901 | antisense | 23 |
| GGGGAGAAAGGUGUUCAAGAU | 806 | gsgsggagAfaAfGfGfuguucaagauL96 | 1902 | sense | 21 |
| AUCUUGAACACCUUUCUCCCCCU | 807 | asUfscuuGfaAfCfaccuUfuCfuccccscsu | 1903 | antisense | 23 |
| GGGGGAGAAAGGUGUUCAAGA | 808 | gsgsgggaGfaAfAfGfguguucaagaL96 | 1904 | sense | 21 |
| UCUUGAACACCUUUCUCCCCCUG | 809 | usCfsuugAfaCfAfccuuUfcUfcccccsusg | 1905 | antisense | 23 |
| AGAAACUUUGGCUGAUAAUAU | 810 | asgsaaacUfuUfGfGfcugauaauauL96 | 1906 | sense | 21 |
| AUAUUAUCAGCCAAAGUUUCUUC | 811 | asUfsauuAfuCfAfgccaAfaGfuuucususc | 1907 | antisense | 23 |
| GAAACUUUGGCUGAUAAUAUU | 812 | gsasaacuUfuGfGfCfugauaauauuL96 | 1908 | sense | 21 |
| AAUAUUAUCAGCCAAAGUUUCUU | 813 | asAfsuauUfaUfCfagccAfaAfguuucsusu | 1909 | antisense | 23 |
| AUGAAGAAACUUUGGCUGAUA | 814 | asusgaagAfaAfCfUfuuggcugauaL96 | 1910 | sense | 21 |
| UAUCAGCCAAAGUUUCUUCAUCA | 815 | usAfsucaGfcCfAfaaguUfuCfuucauscsa | 1911 | antisense | 23 |
| GAUGAAGAAACUUUGGCUGAU | 816 | gsasugaaGfaAfAfCfuuuggcugauL96 | 1912 | sense | 21 |
| AUCAGCCAAAGUUUCUUCAUCAU | 817 | asUfscagCfcAfAfaguuUfcUfucaucsasu | 1913 | antisense | 23 |
| AAGGCACUGAUGUUCUGAAAG | 818 | asasggcaCfuGfAfUfguucugaaagL96 | 1914 | sense | 21 |
| CUUUCAGAACAUCAGUGCCUUUC | 819 | csUfsuucAfgAfAfcaucAfgUfgccuususc | 1915 | antisense | 23 |
| AGGCACUGAUGUUCUGAAAGC | 820 | asgsgcacUfgAfUfGfuucugaaagcL96 | 1916 | sense | 21 |
| GCUUUCAGAACAUCAGUGCCUUU | 821 | gsCfsuuuCfaGfAfacauCfaGfugccususu | 1917 | antisense | 23 |
| CGGAAAGGCACUGAUGUUCUG | 822 | csgsgaaaGfgCfAfCfugauguucugL96 | 1918 | sense | 21 |
| CAGAACAUCAGUGCCUUUCCGCA | 823 | csAfsgaaCfaUfCfagugCfcUfuuccgscsa | 1919 | antisense | 23 |
| GCGGAAAGGCACUGAUGUUCU | 824 | gscsggaaAfgGfCfAfcugauguucuL96 | 1920 | sense | 21 |
| AGAACAUCAGUGCCUUUCCGCAC | 825 | asGfsaacAfuCfAfgugcCfuUfuccgcsasc | 1921 | antisense | 23 |
| AGAAGACUGACAUCAUUGCCA | 826 | asgsaagaCfuGfAfCfaucauugccaL96 | 1922 | sense | 21 |
| UGGCAAUGAUGUCAGUCUUCUCA | 827 | usGfsgcaAfuGfAfugucAfgUfcuucuscsa | 1923 | antisense | 23 |
| GAAGACUGACAUCAUUGCCAA | 828 | gsasagacUfgAfCfAfucauugccaaL96 | 1924 | sense | 21 |
| UUGGCAAUGAUGUCAGUCUUCUC | 829 | usUfsggcAfaUfGfauguCfaGfucuucsusc | 1925 | antisense | 23 |
| GCUGAGAAGACUGACAUCAUU | 830 | gscsugagAfaGfAfCfugacaucauuL96 | 1926 | sense | 21 |
| AAUGAUGUCAGUCUUCUCAGCCA | 831 | asAfsugaUfgUfCfagucUfuCfucagcscsa | 1927 | antisense | 23 |
| GGCUGAGAAGACUGACAUCAU | 832 | gsgscugaGfaAfGfAfcugacaucauL96 | 1928 | sense | 21 |
| AUGAUGUCAGUCUUCUCAGCCAU | 833 | asUfsgauGfuCfAfgucuUfcUfcagccsasu | 1929 | antisense | 23 |
| UAAUGCCUGAUUCACAACUUU | 834 | usasaugcCfuGfAfUfucacaacuuuL96 | 1930 | sense | 21 |
| AAAGUUGUGAAUCAGGCAUUACC | 835 | asAfsaguUfgUfGfaaucAfgGfcauuascsc | 1931 | antisense | 23 |
| AAUGCCUGAUUCACAACUUUG | 836 | asasugccUfgAfUfUfcacaacuuugL96 | 1932 | sense | 21 |
| CAAAGUUGUGAAUCAGGCAUUAC | 837 | csAfsaagUfuGfUfgaauCfaGfgcauusasc | 1933 | antisense | 23 |
| UUGGUAAUGCCUGAUUCACAA | 838 | ususgguaAfuGfCfCfugauucacaaL96 | 1934 | sense | 21 |
| UUGUGAAUCAGGCAUUACCAACA | 839 | usUfsgugAfaUfCfaggcAfuUfaccaascsa | 1935 | antisense | 23 |
| GUUGGUAAUGCCUGAUUCACA | 840 | gsusugguAfaUfGfCfcugauucacaL96 | 1936 | sense | 21 |
| UGUGAAUCAGGCAUUACCAACAC | 841 | usGfsugaAfuCfAfggcaUfuAfccaacsasc | 1937 | antisense | 23 |
| UAUCAAAUGGCUGAGAAGACU | 842 | usasucaaAfuGfGfCfugagaagacuL96 | 1938 | sense | 21 |
| AGUCUUCUCAGCCAUUUGAUAUC | 843 | asGfsucuUfcUfCfagccAfuUfugauasusc | 1939 | antisense | 23 |
| AUCAAAUGGCUGAGAAGACUG | 844 | asuscaaaUfgGfCfUfgagaagacugL96 | 1940 | sense | 21 |
| CAGUCUUCUCAGCCAUUUGAUAU | 845 | csAfsgucUfuCfUfcagcCfaUfuugausasu | 1941 | antisense | 23 |
| AAGAUAUCAAAUGGCUGAGAA | 846 | asasgauaUfcAfAfAfuggcugagaaL96 | 1942 | sense | 21 |
| UUCUCAGCCAUUUGAUAUCUUCC | 847 | usUfscucAfgCfCfauuuGfaUfaucuuscsc | 1943 | antisense | 23 |
| GAAGAUAUCAAAUGGCUGAGA | 848 | gsasagauAfuCfAfAfauggcugagaL96 | 1944 | sense | 21 |
| UCUCAGCCAUUUGAUAUCUUCCC | 849 | usCfsucaGfcCfAfuuugAfuAfucuucscsc | 1945 | antisense | 23 |
| UCUGACAGUGCACAAUAUUUU | 850 | uscsugacAfgUfGfCfacaauauuuuL96 | 1946 | sense | 21 |
| AAAAUAUUGUGCACUGUCAGAUC | 851 | asAfsaauAfuUfGfugcaCfuGfucagasusc | 1947 | antisense | 23 |
| CUGACAGUGCACAAUAUUUUC | 852 | csusgacaGfuGfCfAfcaauauuuucL96 | 1948 | sense | 21 |
| GAAAAUAUUGUGCACUGUCAGAU | 853 | gsAfsaaaUfaUfUfgugcAfcUfgucagsasu | 1949 | antisense | 23 |
| AAGAUCUGACAGUGCACAAUA | 854 | asasgaucUfgAfCfAfgugcacaauaL96 | 1950 | sense | 21 |
| UAUUGUGCACUGUCAGAUCUUGG | 855 | usAfsuugUfgCfAfcuguCfaGfaucuusgsg | 1951 | antisense | 23 |
| CAAGAUCUGACAGUGCACAAU | 856 | csasagauCfuGfAfCfagugcacaauL96 | 1952 | sense | 21 |
| AUUGUGCACUGUCAGAUCUUGGA | 857 | asUfsuguGfcAfCfugucAfgAfucuugsgsa | 1953 | antisense | 23 |
| ACUGAUGUUCUGAAAGCUCUG | 858 | ascsugauGfuUfCfUfgaaagcucugL96 | 1954 | sense | 21 |
| CAGAGCUUUCAGAACAUCAGUGC | 859 | csAfsgagCfuUfUfcagaAfcAfucagusgsc | 1955 | antisense | 23 |
| CUGAUGUUCUGAAAGCUCUGG | 860 | csusgaugUfuCfUfGfaaagcucuggL96 | 1956 | sense | 21 |
| CCAGAGCUUUCAGAACAUCAGUG | 861 | csCfsagaGfcUfUfucagAfaCfaucagsusg | 1957 | antisense | 23 |
| AGGCACUGAUGUUCUGAAAGC | 862 | asgsgcacUfgAfUfGfuucugaaagcL96 | 1958 | sense | 21 |
| GCUUUCAGAACAUCAGUGCCUUU | 863 | gsCfsuuuCfaGfAfacauCfaGfugccususu | 1959 | antisense | 23 |
| AAGGCACUGAUGUUCUGAAAG | 864 | asasggcaCfuGfAfUfguucugaaagL96 | 1960 | sense | 21 |
| CUUUCAGAACAUCAGUGCCUUUC | 865 | csUfsuucAfgAfAfcaucAfgUfgccuususc | 1961 | antisense | 23 |
| AACAACAUGCUAAAUCAGUAC | 866 | asascaacAfuGfCfUfaaaucaguacL96 | 1962 | sense | 21 |
| GUACUGAUUUAGCAUGUUGUUCA | 867 | gsUfsacuGfaUfUfuagcAfuGfuuguuscsa | 1963 | antisense | 23 |
| ACAACAUGCUAAAUCAGUACU | 868 | ascsaacaUfgCfUfAfaaucaguacuL96 | 1964 | sense | 21 |
| AGUACUGAUUUAGCAUGUUGUUC | 869 | asGfsuacUfgAfUfuuagCfaUfguugususc | 1965 | antisense | 23 |
| UAUGAACAACAUGCUAAAUCA | 870 | usasugaaCfaAfCfAfugcuaaaucaL96 | 1966 | sense | 21 |
| UGAUUUAGCAUGUUGUUCAUAAU | 871 | usGfsauuUfaGfCfauguUfgUfucauasasu | 1967 | antisense | 23 |
| UUAUGAACAACAUGCUAAAUC | 872 | ususaugaAfcAfAfCfaugcuaaaucL96 | 1968 | sense | 21 |
| GAUUUAGCAUGUUGUUCAUAAUC | 873 | gsAfsuuuAfgCfAfuguuGfuUfcauaasusc | 1969 | antisense | 23 |
| UCUUUAGUGUCUGAAUAUAUC | 874 | uscsuuuaGfuGfUfCfugaauauaucL96 | 1970 | sense | 21 |
| GAUAUAUUCAGACACUAAAGAUG | 875 | gsAfsuauAfuUfCfagacAfcUfaaagasusg | 1971 | antisense | 23 |
| CUUUAGUGUCUGAAUAUAUCC | 876 | csusuuagUfgUfCfUfgaauauauccL96 | 1972 | sense | 21 |
| GGAUAUAUUCAGACACUAAAGAU | 877 | gsGfsauaUfaUfUfcagaCfaCfuaaagsasu | 1973 | antisense | 23 |
| CACAUCUUUAGUGUCUGAAUA | 878 | csascaucUfuUfAfGfugucugaauaL96 | 1974 | sense | 21 |
| UAUUCAGACACUAAAGAUGUGAU | 879 | usAfsuucAfgAfCfacuaAfaGfaugugsasu | 1975 | antisense | 23 |
| UCACAUCUUUAGUGUCUGAAU | 880 | uscsacauCfuUfUfAfgugucugaauL96 | 1976 | sense | 21 |
| AUUCAGACACUAAAGAUGUGAUU | 881 | asUfsucaGfaCfAfcuaaAfgAfugugasusu | 1977 | antisense | 23 |
| UGAUACUUCUUUGAAUGUAGA | 882 | usgsauacUfuCfUfUfugaauguagaL96 | 1978 | sense | 21 |
| UCUACAUUCAAAGAAGUAUCACC | 883 | usCfsuacAfuUfCfaaagAfaGfuaucascsc | 1979 | antisense | 23 |
| GAUACUUCUUUGAAUGUAGAU | 884 | gsasuacuUfcUfUfUfgaauguagauL96 | 1980 | sense | 21 |
| AUCUACAUUCAAAGAAGUAUCAC | 885 | asUfscuaCfaUfUfcaaaGfaAfguaucsasc | 1981 | antisense | 23 |
| UUGGUGAUACUUCUUUGAAUG | 886 | ususggugAfuAfCfUfucuuugaaugL96 | 1982 | sense | 21 |
| CAUUCAAAGAAGUAUCACCAAUU | 887 | csAfsuucAfaAfGfaaguAfuCfaccaasusu | 1983 | antisense | 23 |
| AUUGGUGAUACUUCUUUGAAU | 888 | asusugguGfaUfAfCfuucuuugaauL96 | 1984 | sense | 21 |
| AUUCAAAGAAGUAUCACCAAUUA | 889 | asUfsucaAfaGfAfaguaUfcAfccaaususa | 1985 | antisense | 23 |
| AAUAACCUGUGAAAAUGCUCC | 890 | asasuaacCfuGfUfGfaaaaugcuccL96 | 1986 | sense | 21 |
| GGAGCAUUUUCACAGGUUAUUGC | 891 | gsGfsagcAfuUfUfucacAfgGfuuauusgsc | 1987 | antisense | 23 |
| AUAACCUGUGAAAAUGCUCCC | 892 | asusaaccUfgUfGfAfaaaugcucccL96 | 1988 | sense | 21 |
| GGGAGCAUUUUCACAGGUUAUUG | 893 | gsGfsgagCfaUfUfuucaCfaGfguuaususg | 1989 | antisense | 23 |
| UAGCAAUAACCUGUGAAAAUG | 894 | usasgcaaUfaAfCfCfugugaaaaugL96 | 1990 | sense | 21 |
| CAUUUUCACAGGUUAUUGCUAUC | 895 | csAfsuuuUfcAfCfagguUfaUfugcuasusc | 1991 | antisense | 23 |
| AUAGCAAUAACCUGUGAAAAU | 896 | asusagcaAfuAfAfCfcugugaaaauL96 | 1992 | sense | 21 |
| AUUUUCACAGGUUAUUGCUAUCC | 897 | asUfsuuuCfaCfAfgguuAfuUfgcuauscsc | 1993 | antisense | 23 |
| AAUCACAUCUUUAGUGUCUGA | 898 | asasucacAfuCfUfUfuagugucugaL96 | 1994 | sense | 21 |
| UCAGACACUAAAGAUGUGAUUGG | 899 | usCfsagaCfaCfUfaaagAfuGfugauusgsg | 1995 | antisense | 23 |
| AUCACAUCUUUAGUGUCUGAA | 900 | asuscacaUfcUfUfUfagugucugaaL96 | 1996 | sense | 21 |
| UUCAGACACUAAAGAUGUGAUUG | 901 | usUfscagAfcAfCfuaaaGfaUfgugaususg | 1997 | antisense | 23 |
| UUCCAAUCACAUCUUUAGUGU | 902 | ususccaaUfcAfCfAfucuuuaguguL96 | 1998 | sense | 21 |
| ACACUAAAGAUGUGAUUGGAAAU | 903 | asCfsacuAfaAfGfauguGfaUfuggaasasu | 1999 | antisense | 23 |
| UUUCCAAUCACAUCUUUAGUG | 904 | ususuccaAfuCfAfCfaucuuuagugL96 | 2000 | sense | 21 |
| CACUAAAGAUGUGAUUGGAAAUC | 905 | csAfscuaAfaGfAfugugAfuUfggaaasusc | 2001 | antisense | 23 |
| ACGGGCAUGAUGUUGAGUUCC | 906 | ascsgggcAfuGfAfUfguugaguuccL96 | 2002 | sense | 21 |
| GGAACUCAACAUCAUGCCCGUUC | 907 | gsGfsaacUfcAfAfcaucAfuGfcccgususc | 2003 | antisense | 23 |
| CGGGCAUGAUGUUGAGUUCCU | 908 | csgsggcaUfgAfUfGfuugaguuccuL96 | 2004 | sense | 21 |
| AGGAACUCAACAUCAUGCCCGUU | 909 | asGfsgaaCfuCfAfacauCfaUfgcccgsusu | 2005 | antisense | 23 |
| GGGAACGGGCAUGAUGUUGAG | 910 | gsgsgaacGfgGfCfAfugauguugagL96 | 2006 | sense | 21 |
| CUCAACAUCAUGCCCGUUCCCAG | 911 | csUfscaaCfaUfCfaugcCfcGfuucccsasg | 2007 | antisense | 23 |
| UGGGAACGGGCAUGAUGUUGA | 912 | usgsggaaCfgGfGfCfaugauguugaL96 | 2008 | sense | 21 |
| UCAACAUCAUGCCCGUUCCCAGG | 913 | usCfsaacAfuCfAfugccCfgUfucccasgsg | 2009 | antisense | 23 |
| ACUAAGGUGAAAAGAUAAUGA | 914 | ascsuaagGfuGfAfAfaagauaaugaL96 | 2010 | sense | 21 |
| UCAUUAUCUUUUCACCUUAGUGU | 915 | usCfsauuAfuCfUfuuucAfcCfuuagusgsu | 2011 | antisense | 23 |
| CUAAGGUGAAAAGAUAAUGAU | 916 | csusaaggUfgAfAfAfagauaaugauL96 | 2012 | sense | 21 |
| AUCAUUAUCUUUUCACCUUAGUG | 917 | asUfscauUfaUfCfuuuuCfaCfcuuagsusg | 2013 | antisense | 23 |
| AAACACUAAGGUGAAAAGAUA | 918 | asasacacUfaAfGfGfugaaaagauaL96 | 2014 | sense | 21 |
| UAUCUUUUCACCUUAGUGUUUGC | 919 | usAfsucuUfuUfCfaccuUfaGfuguuusgsc | 2015 | antisense | 23 |
| CAAACACUAAGGUGAAAAGAU | 920 | csasaacaCfuAfAfGfgugaaaagauL96 | 2016 | sense | 21 |
| AUCUUUUCACCUUAGUGUUUGCU | 921 | asUfscuuUfuCfAfccuuAfgUfguuugscsu | 2017 | antisense | 23 |
| AGGUAGCACUGGAGAGAAUUG | 922 | asgsguagCfaCfUfGfgagagaauugL96 | 2018 | sense | 21 |
| CAAUUCUCUCCAGUGCUACCUUC | 923 | csAfsauuCfuCfUfccagUfgCfuaccususc | 2019 | antisense | 23 |
| GGUAGCACUGGAGAGAAUUGG | 924 | gsgsuagcAfcUfGfGfagagaauuggL96 | 2020 | sense | 21 |
| CCAAUUCUCUCCAGUGCUACCUU | 925 | csCfsaauUfcUfCfuccaGfuGfcuaccsusu | 2021 | antisense | 23 |
| GAGAAGGUAGCACUGGAGAGA | 926 | gsasgaagGfuAfGfCfacuggagagaL96 | 2022 | sense | 21 |
| UCUCUCCAGUGCUACCUUCUCAA | 927 | usCfsucuCfcAfGfugcuAfcCfuucucsasa | 2023 | antisense | 23 |
| UGAGAAGGUAGCACUGGAGAG | 928 | usgsagaaGfgUfAfGfcacuggagagL96 | 2024 | sense | 21 |
| CUCUCCAGUGCUACCUUCUCAAA | 929 | csUfscucCfaGfUfgcuaCfcUfucucasasa | 2025 | antisense | 23 |
| AGUGGACUUGCUGCAUAUGUG | 930 | asgsuggaCfuUfGfCfugcauaugugL96 | 2026 | sense | 21 |
| CACAUAUGCAGCAAGUCCACUGU | 931 | csAfscauAfuGfCfagcaAfgUfccacusgsu | 2027 | antisense | 23 |
| GUGGACUUGCUGCAUAUGUGG | 932 | gsusggacUfuGfCfUfgcauauguggL96 | 2028 | sense | 21 |
| CCACAUAUGCAGCAAGUCCACUG | 933 | csCfsacaUfaUfGfcagcAfaGfuccacsusg | 2029 | antisense | 23 |
| CGACAGUGGACUUGCUGCAUA | 934 | csgsacagUfgGfAfCfuugcugcauaL96 | 2030 | sense | 21 |
| UAUGCAGCAAGUCCACUGUCGUC | 935 | usAfsugcAfgCfAfagucCfaCfugucgsusc | 2031 | antisense | 23 |
| ACGACAGUGGACUUGCUGCAU | 936 | ascsgacaGfuGfGfAfcuugcugcauL96 | 2032 | sense | 21 |
| AUGCAGCAAGUCCACUGUCGUCU | 937 | asUfsgcaGfcAfAfguccAfcUfgucguscsu | 2033 | antisense | 23 |
| AAGGUGUUCAAGAUGUCCUCG | 938 | asasggugUfuCfAfAfgauguccucgL96 | 2034 | sense | 21 |
| CGAGGACAUCUUGAACACCUUUC | 939 | csGfsaggAfcAfUfcuugAfaCfaccuususc | 2035 | antisense | 23 |
| AGGUGUUCAAGAUGUCCUCGA | 940 | asgsguguUfcAfAfGfauguccucgaL96 | 2036 | sense | 21 |
| UCGAGGACAUCUUGAACACCUUU | 941 | usCfsgagGfaCfAfucuuGfaAfcaccususu | 2037 | antisense | 23 |
| GAGAAAGGUGUUCAAGAUGUC | 942 | gsasgaaaGfgUfGfUfucaagaugucL96 | 2038 | sense | 21 |
| GACAUCUUGAACACCUUUCUCCC | 943 | gsAfscauCfuUfGfaacaCfcUfuucucscsc | 2039 | antisense | 23 |
| GGAGAAAGGUGUUCAAGAUGU | 944 | gsgsagaaAfgGfUfGfuucaagauguL96 | 2040 | sense | 21 |
| ACAUCUUGAACACCUUUCUCCCC | 945 | asCfsaucUfuGfAfacacCfuUfucuccscsc | 2041 | antisense | 23 |
| AACCGUCUGGAUGAUGUGCGU | 946 | asasccguCfuGfGfAfugaugugcguL96 | 2042 | sense | 21 |
| ACGCACAUCAUCCAGACGGUUGC | 947 | asCfsgcaCfaUfCfauccAfgAfcgguusgsc | 2043 | antisense | 23 |
| ACCGUCUGGAUGAUGUGCGUA | 948 | ascscgucUfgGfAfUfgaugugcguaL96 | 2044 | sense | 21 |
| UACGCACAUCAUCCAGACGGUUG | 949 | usAfscgcAfcAfUfcaucCfaGfacggususg | 2045 | antisense | 23 |
| GGGCAACCGUCUGGAUGAUGU | 950 | gsgsgcaaCfcGfUfCfuggaugauguL96 | 2046 | sense | 21 |
| ACAUCAUCCAGACGGUUGCCCAG | 951 | asCfsaucAfuCfCfagacGfgUfugcccsasg | 2047 | antisense | 23 |
| UGGGCAACCGUCUGGAUGAUG | 952 | usgsggcaAfcCfGfUfcuggaugaugL96 | 2048 | sense | 21 |
| CAUCAUCCAGACGGUUGCCCAGG | 953 | csAfsucaUfcCfAfgacgGfuUfgcccasgsg | 2049 | antisense | 23 |
| GAAACUUUGGCUGAUAAUAUU | 954 | gsasaacuUfuGfGfCfugauaauauuL96 | 2050 | sense | 21 |
| AAUAUUAUCAGCCAAAGUUUCUU | 955 | asAfsuauUfaUfCfagccAfaAfguuucsusu | 2051 | antisense | 23 |
| AAACUUUGGCUGAUAAUAUUG | 956 | asasacuuUfgGfCfUfgauaauauugL96 | 2052 | sense | 21 |
| CAAUAUUAUCAGCCAAAGUUUCU | 957 | csAfsauaUfuAfUfcagcCfaAfaguuuscsu | 2053 | antisense | 23 |
| UGAAGAAACUUUGGCUGAUAA | 958 | usgsaagaAfaCfUfUfuggcugauaaL96 | 2054 | sense | 21 |
| UUAUCAGCCAAAGUUUCUUCAUC | 959 | usUfsaucAfgCfCfaaagUfuUfcuucasusc | 2055 | antisense | 23 |
| AUGAAGAAACUUUGGCUGAUA | 960 | asusgaagAfaAfCfUfuuggcugauaL96 | 2056 | sense | 21 |
| UAUCAGCCAAAGUUUCUUCAUCA | 961 | usAfsucaGfcCfAfaaguUfuCfuucauscsa | 2057 | antisense | 23 |
| AAAGGUGUUCAAGAUGUCCUC | 962 | asasagguGfuUfCfAfagauguccucL96 | 2058 | sense | 21 |
| GAGGACAUCUUGAACACCUUUCU | 963 | gsAfsggaCfaUfCfuugaAfcAfccuuuscsu | 2059 | antisense | 23 |
| AAGGUGUUCAAGAUGUCCUCG | 964 | asasggugUfuCfAfAfgauguccucgL96 | 2060 | sense | 21 |
| CGAGGACAUCUUGAACACCUUUC | 965 | csGfsaggAfcAfUfcuugAfaCfaccuususc | 2061 | antisense | 23 |
| GGAGAAAGGUGUUCAAGAUGU | 966 | gsgsagaaAfgGfUfGfuucaagauguL96 | 2062 | sense | 21 |
| ACAUCUUGAACACCUUUCUCCCC | 967 | asCfsaucUfuGfAfacacCfuUfucuccscsc | 2063 | antisense | 23 |
| GGGAGAAAGGUGUUCAAGAUG | 968 | gsgsgagaAfaGfGfUfguucaagaugL96 | 2064 | sense | 21 |
| CAUCUUGAACACCUUUCUCCCCC | 969 | csAfsucuUfgAfAfcaccUfuUfcucccscsc | 2065 | antisense | 23 |
| AAAUCAGUACUUCCAAAGUCU | 970 | asasaucaGfuAfCfUfuccaaagucuL96 | 2066 | sense | 21 |
| AGACUUUGGAAGUACUGAUUUAG | 971 | asGfsacuUfuGfGfaaguAfcUfgauuusasg | 2067 | antisense | 23 |
| AAUCAGUACUUCCAAAGUCUA | 972 | asasucagUfaCfUfUfccaaagucuaL96 | 2068 | sense | 21 |
| UAGACUUUGGAAGUACUGAUUUA | 973 | usAfsgacUfuUfGfgaagUfaCfugauususa | 2069 | antisense | 23 |
| UGCUAAAUCAGUACUUCCAAA | 974 | usgscuaaAfuCfAfGfuacuuccaaaL96 | 2070 | sense | 21 |
| UUUGGAAGUACUGAUUUAGCAUG | 975 | usUfsuggAfaGfUfacugAfuUfuagcasusg | 2071 | antisense | 23 |
| AUGCUAAAUCAGUACUUCCAA | 976 | asusgcuaAfaUfCfAfguacuuccaaL96 | 2072 | sense | 21 |
| UUGGAAGUACUGAUUUAGCAUGU | 977 | usUfsggaAfgUfAfcugaUfuUfagcausgsu | 2073 | antisense | 23 |
| ACAUCUUUAGUGUCUGAAUAU | 978 | ascsaucuUfuAfGfUfgucugaauauL96 | 2074 | sense | 21 |
| AUAUUCAGACACUAAAGAUGUGA | 979 | asUfsauuCfaGfAfcacuAfaAfgaugusgsa | 2075 | antisense | 23 |
| CAUCUUUAGUGUCUGAAUAUA | 980 | csasucuuUfaGfUfGfucugaauauaL96 | 2076 | sense | 21 |
| UAUAUUCAGACACUAAAGAUGUG | 981 | usAfsuauUfcAfGfacacUfaAfagaugsusg | 2077 | antisense | 23 |
| AAUCACAUCUUUAGUGUCUGA | 982 | asasucacAfuCfUfUfuagugucugaL96 | 2078 | sense | 21 |
| UCAGACACUAAAGAUGUGAUUGG | 983 | usCfsagaCfaCfUfaaagAfuGfugauusgsg | 2079 | antisense | 23 |
| CAAUCACAUCUUUAGUGUCUG | 984 | csasaucaCfaUfCfUfuuagugucugL96 | 2080 | sense | 21 |
| CAGACACUAAAGAUGUGAUUGGA | 985 | csAfsgacAfcUfAfaagaUfgUfgauugsgsa | 2081 | antisense | 23 |
| GCAUGUAUUACUUGACAAAGA | 986 | gscsauguAfuUfAfCfuugacaaagaL96 | 2082 | sense | 21 |
| UCUUUGUCAAGUAAUACAUGCUG | 987 | usCfsuuuGfuCfAfaguaAfuAfcaugcsusg | 2083 | antisense | 23 |
| CAUGUAUUACUUGACAAAGAG | 988 | csasuguaUfuAfCfUfugacaaagagL96 | 2084 | sense | 21 |
| CUCUUUGUCAAGUAAUACAUGCU | 989 | csUfscuuUfgUfCfaaguAfaUfacaugscsu | 2085 | antisense | 23 |
| UUCAGCAUGUAUUACUUGACA | 990 | ususcagcAfuGfUfAfuuacuugacaL96 | 2086 | sense | 21 |
| UGUCAAGUAAUACAUGCUGAAAA | 991 | usGfsucaAfgUfAfauacAfuGfcugaasasa | 2087 | antisense | 23 |
| UUUCAGCAUGUAUUACUUGAC | 992 | ususucagCfaUfGfUfauuacuugacL96 | 2088 | sense | 21 |
| GUCAAGUAAUACAUGCUGAAAAA | 993 | gsUfscaaGfuAfAfuacaUfgCfugaaasasa | 2089 | antisense | 23 |
| AUGUUACUUCUUAGAGAGAAA | 994 | asusguuaCfuUfCfUfuagagagaaaL96 | 2090 | sense | 21 |
| UUUCUCUCUAAGAAGUAACAUAC | 995 | usUfsucuCfuCfUfaagaAfgUfaacausasc | 2091 | antisense | 23 |
| UGUUACUUCUUAGAGAGAAAU | 996 | usgsuuacUfuCfUfUfagagagaaauL96 | 2092 | sense | 21 |
| AUUUCUCUCUAAGAAGUAACAUA | 997 | asUfsuucUfcUfCfuaagAfaGfuaacasusa | 2093 | antisense | 23 |
| AUGUAUGUUACUUCUUAGAGA | 998 | asusguauGfuUfAfCfuucuuagagaL96 | 2094 | sense | 21 |
| UCUCUAAGAAGUAACAUACAUCC | 999 | usCfsucuAfaGfAfaguaAfcAfuacauscsc | 2095 | antisense | 23 |
| GAUGUAUGUUACUUCUUAGAG | 1000 | gsasuguaUfgUfUfAfcuucuuagagL96 | 2096 | sense | 21 |
| CUCUAAGAAGUAACAUACAUCCU | 1001 | csUfscuaAfgAfAfguaaCfaUfacaucscsu | 2097 | antisense | 23 |
| ACAACUUUGAGAAGGUAGCAC | 1002 | ascsaacuUfuGfAfGfaagguagcacL96 | 2098 | sense | 21 |
| GUGCUACCUUCUCAAAGUUGUGA | 1003 | gsUfsgcuAfcCfUfucucAfaAfguugusgsa | 2099 | antisense | 23 |
| CAACUUUGAGAAGGUAGCACU | 1004 | csasacuuUfgAfGfAfagguagcacuL96 | 2100 | sense | 21 |
| AGUGCUACCUUCUCAAAGUUGUG | 1005 | asGfsugcUfaCfCfuucuCfaAfaguugsusg | 2101 | antisense | 23 |
| AUUCACAACUUUGAGAAGGUA | 1006 | asusucacAfaCfUfUfugagaagguaL96 | 2102 | sense | 21 |
| UACCUUCUCAAAGUUGUGAAUCA | 1007 | usAfsccuUfcUfCfaaagUfuGfugaauscsa | 2103 | antisense | 23 |
| GAUUCACAACUUUGAGAAGGU | 1008 | gsasuucaCfaAfCfUfuugagaagguL96 | 2104 | sense | 21 |
| ACCUUCUCAAAGUUGUGAAUCAG | 1009 | asCfscuuCfuCfAfaaguUfgUfgaaucsasg | 2105 | antisense | 23 |
| AACAUGCUAAAUCAGUACUUC | 1010 | asascaugCfuAfAfAfucaguacuucL96 | 2106 | sense | 21 |
| GAAGUACUGAUUUAGCAUGUUGU | 1011 | gsAfsaguAfcUfGfauuuAfgCfauguusgsu | 2107 | antisense | 23 |
| ACAUGCUAAAUCAGUACUUCC | 1012 | ascsaugcUfaAfAfUfcaguacuuccL96 | 2108 | sense | 21 |
| GGAAGUACUGAUUUAGCAUGUUG | 1013 | gsGfsaagUfaCfUfgauuUfaGfcaugususg | 2109 | antisense | 23 |
| GAACAACAUGCUAAAUCAGUA | 1014 | gsasacaaCfaUfGfCfuaaaucaguaL96 | 2110 | sense | 21 |
| UACUGAUUUAGCAUGUUGUUCAU | 1015 | usAfscugAfuUfUfagcaUfgUfuguucsasu | 2111 | antisense | 23 |
| UGAACAACAUGCUAAAUCAGU | 1016 | usgsaacaAfcAfUfGfcuaaaucaguL96 | 2112 | sense | 21 |
| ACUGAUUUAGCAUGUUGUUCAUA | 1017 | asCfsugaUfuUfAfgcauGfuUfguucasusa | 2113 | antisense | 23 |
| AAACCAGUACUUUAUCAUUUU | 1018 | asasaccaGfuAfCfUfuuaucauuuuL96 | 2114 | sense | 21 |
| AAAAUGAUAAAGUACUGGUUUCA | 1019 | asAfsaauGfaUfAfaaguAfcUfgguuuscsa | 2115 | antisense | 23 |
| AACCAGUACUUUAUCAUUUUC | 1020 | asasccagUfaCfUfUfuaucauuuucL96 | 2116 | sense | 21 |
| GAAAAUGAUAAAGUACUGGUUUC | 1021 | gsAfsaaaUfgAfUfaaagUfaCfugguususc | 2117 | antisense | 23 |
| UUUGAAACCAGUACUUUAUCA | 1022 | ususugaaAfcCfAfGfuacuuuaucaL96 | 2118 | sense | 21 |
| UGAUAAAGUACUGGUUUCAAAAU | 1023 | usGfsauaAfaGfUfacugGfuUfucaaasasu | 2119 | antisense | 23 |
| UUUUGAAACCAGUACUUUAUC | 1024 | ususuugaAfaCfCfAfguacuuuaucL96 | 2120 | sense | 21 |
| GAUAAAGUACUGGUUUCAAAAUU | 1025 | gsAfsuaaAfgUfAfcuggUfuUfcaaaasusu | 2121 | antisense | 23 |
| GAGAAGAUGGGCUACAAGGCC | 1026 | gsasgaagAfuGfGfGfcuacaaggccL96 | 2122 | sense | 21 |
| GGCCUUGUAGCCCAUCUUCUCUG | 1027 | gsGfsccuUfgUfAfgcccAfuCfuucucsusg | 2123 | antisense | 23 |
| AGAAGAUGGGCUACAAGGCCA | 1028 | asgsaagaUfgGfGfCfuacaaggccaL96 | 2124 | sense | 21 |
| UGGCCUUGUAGCCCAUCUUCUCU | 1029 | usGfsgccUfuGfUfagccCfaUfcuucuscsu | 2125 | antisense | 23 |
| GGCAGAGAAGAUGGGCUACAA | 1030 | gsgscagaGfaAfGfAfugggcuacaaL96 | 2126 | sense | 21 |
| UUGUAGCCCAUCUUCUCUGCCUG | 1031 | usUfsguaGfcCfCfaucuUfcUfcugccsusg | 2127 | antisense | 23 |
| AGGCAGAGAAGAUGGGCUACA | 1032 | asgsgcagAfgAfAfGfaugggcuacaL96 | 2128 | sense | 21 |
| UGUAGCCCAUCUUCUCUGCCUGC | 1033 | usGfsuagCfcCfAfucuuCfuCfugccusgsc | 2129 | antisense | 23 |
| AACGGGCAUGAUGUUGAGUUC | 1034 | asascgggCfaUfGfAfuguugaguucL96 | 2130 | sense | 21 |
| GAACUCAACAUCAUGCCCGUUCC | 1035 | gsAfsacuCfaAfCfaucaUfgCfccguuscsc | 2131 | antisense | 23 |
| ACGGGCAUGAUGUUGAGUUCC | 1036 | ascsgggcAfuGfAfUfguugaguuccL96 | 2132 | sense | 21 |
| GGAACUCAACAUCAUGCCCGUUC | 1037 | gsGfsaacUfcAfAfcaucAfuGfcccgususc | 2133 | antisense | 23 |
| UGGGAACGGGCAUGAUGUUGA | 1038 | usgsggaaCfgGfGfCfaugauguugaL96 | 2134 | sense | 21 |
| UCAACAUCAUGCCCGUUCCCAGG | 1039 | usCfsaacAfuCfAfugccCfgUfucccasgsg | 2135 | antisense | 23 |
| CUGGGAACGGGCAUGAUGUUG | 1040 | csusgggaAfcGfGfGfcaugauguugL96 | 2136 | sense | 21 |
| CAACAUCAUGCCCGUUCCCAGGG | 1041 | csAfsacaUfcAfUfgcccGfuUfcccagsgsg | 2137 | antisense | 23 |
| AUGUGGCUAAAGCAAUAGACC | 1042 | asusguggCfuAfAfAfgcaauagaccL96 | 2138 | sense | 21 |
| GGUCUAUUGCUUUAGCCACAUAU | 1043 | gsGfsucuAfuUfGfcuuuAfgCfcacausasu | 2139 | antisense | 23 |
| UGUGGCUAAAGCAAUAGACCC | 1044 | usgsuggcUfaAfAfGfcaauagacccL96 | 2140 | sense | 21 |
| GGGUCUAUUGCUUUAGCCACAUA | 1045 | gsGfsgucUfaUfUfgcuuUfaGfccacasusa | 2141 | antisense | 23 |
| GCAUAUGUGGCUAAAGCAAUA | 1046 | gscsauauGfuGfGfCfuaaagcaauaL96 | 2142 | sense | 21 |
| UAUUGCUUUAGCCACAUAUGCAG | 1047 | usAfsuugCfuUfUfagccAfcAfuaugcsasg | 2143 | antisense | 23 |
| UGCAUAUGUGGCUAAAGCAAU | 1048 | usgscauaUfgUfGfGfcuaaagcaauL96 | 2144 | sense | 21 |
| AUUGCUUUAGCCACAUAUGCAGC | 1049 | asUfsugcUfuUfAfgccaCfaUfaugcasgsc | 2145 | antisense | 23 |
| AGGAUGCUCCGGAAUGUUGCU | 1050 | asgsgaugCfuCfCfGfgaauguugcuL96 | 2146 | sense | 21 |
| AGCAACAUUCCGGAGCAUCCUUG | 1051 | asGfscaaCfaUfUfccggAfgCfauccususg | 2147 | antisense | 23 |
| GGAUGCUCCGGAAUGUUGCUG | 1052 | gsgsaugcUfcCfGfGfaauguugcugL96 | 2148 | sense | 21 |
| CAGCAACAUUCCGGAGCAUCCUU | 1053 | csAfsgcaAfcAfUfuccgGfaGfcauccsusu | 2149 | antisense | 23 |
| UCCAAGGAUGCUCCGGAAUGU | 1054 | uscscaagGfaUfGfCfuccggaauguL96 | 2150 | sense | 21 |
| ACAUUCCGGAGCAUCCUUGGAUA | 1055 | asCfsauuCfcGfGfagcaUfcCfuuggasusa | 2151 | antisense | 23 |
| AUCCAAGGAUGCUCCGGAAUG | 1056 | asusccaaGfgAfUfGfcuccggaaugL96 | 2152 | sense | 21 |
| CAUUCCGGAGCAUCCUUGGAUAC | 1057 | csAfsuucCfgGfAfgcauCfcUfuggausasc | 2153 | antisense | 23 |
| UCACAUCUUUAGUGUCUGAAU | 1058 | uscsacauCfuUfUfAfgugucugaauL96 | 2154 | sense | 21 |
| AUUCAGACACUAAAGAUGUGAUU | 1059 | asUfsucaGfaCfAfcuaaAfgAfugugasusu | 2155 | antisense | 23 |
| CACAUCUUUAGUGUCUGAAUA | 1060 | csascaucUfuUfAfGfugucugaauaL96 | 2156 | sense | 21 |
| UAUUCAGACACUAAAGAUGUGAU | 1061 | usAfsuucAfgAfCfacuaAfaGfaugugsasu | 2157 | antisense | 23 |
| CCAAUCACAUCUUUAGUGUCU | 1062 | cscsaaucAfcAfUfCfuuuagugucuL96 | 2158 | sense | 21 |
| AGACACUAAAGAUGUGAUUGGAA | 1063 | asGfsacaCfuAfAfagauGfuGfauuggsasa | 2159 | antisense | 23 |
| UCCAAUCACAUCUUUAGUGUC | 1064 | uscscaauCfaCfAfUfcuuuagugucL96 | 2160 | sense | 21 |
| GACACUAAAGAUGUGAUUGGAAA | 1065 | gsAfscacUfaAfAfgaugUfgAfuuggasasa | 2161 | antisense | 23 |
| AAAUGUGUUUAGACAACGUCA | 1066 | asasauguGfuUfUfAfgacaacgucaL96 | 2162 | sense | 21 |
| UGACGUUGUCUAAACACAUUUUC | 1067 | usGfsacgUfuGfUfcuaaAfcAfcauuususc | 2163 | antisense | 23 |
| AAUGUGUUUAGACAACGUCAU | 1068 | asasugugUfuUfAfGfacaacgucauL96 | 2164 | sense | 21 |
| AUGACGUUGUCUAAACACAUUUU | 1069 | asUfsgacGfuUfGfucuaAfaCfacauususu | 2165 | antisense | 23 |
| UUGAAAAUGUGUUUAGACAAC | 1070 | ususgaaaAfuGfUfGfuuuagacaacL96 | 2166 | sense | 21 |
| GUUGUCUAAACACAUUUUCAAUG | 1071 | gsUfsuguCfuAfAfacacAfuUfuucaasusg | 2167 | antisense | 23 |
| AUUGAAAAUGUGUUUAGACAA | 1072 | asusugaaAfaUfGfUfguuuagacaaL96 | 2168 | sense | 21 |
| UUGUCUAAACACAUUUUCAAUGU | 1073 | usUfsgucUfaAfAfcacaUfuUfucaausgsu | 2169 | antisense | 23 |
| UACUAAAGGAAGAAUUCCGGU | 1074 | usascuaaAfgGfAfAfgaauuccgguL96 | 2170 | sense | 21 |
| ACCGGAAUUCUUCCUUUAGUAUC | 1075 | asCfscggAfaUfUfcuucCfuUfuaguasusc | 2171 | antisense | 23 |
| ACUAAAGGAAGAAUUCCGGUU | 1076 | ascsuaaaGfgAfAfGfaauuccgguuL96 | 2172 | sense | 21 |
| AACCGGAAUUCUUCCUUUAGUAU | 1077 | asAfsccgGfaAfUfucuuCfcUfuuagusasu | 2173 | antisense | 23 |
| GAGAUACUAAAGGAAGAAUUC | 1078 | gsasgauaCfuAfAfAfggaagaauucL96 | 2174 | sense | 21 |
| GAAUUCUUCCUUUAGUAUCUCGA | 1079 | gsAfsauuCfuUfCfcuuuAfgUfaucucsgsa | 2175 | antisense | 23 |
| CGAGAUACUAAAGGAAGAAUU | 1080 | csgsagauAfcUfAfAfaggaagaauuL96 | 2176 | sense | 21 |
| AAUUCUUCCUUUAGUAUCUCGAG | 1081 | asAfsuucUfuCfCfuuuaGfuAfucucgsasg | 2177 | antisense | 23 |
| AACUUUGGCUGAUAAUAUUGC | 1082 | asascuuuGfgCfUfGfauaauauugcL96 | 2178 | sense | 21 |
| GCAAUAUUAUCAGCCAAAGUUUC | 1083 | gsCfsaauAfuUfAfucagCfcAfaaguususc | 2179 | antisense | 23 |
| ACUUUGGCUGAUAAUAUUGCA | 1084 | ascsuuugGfcUfGfAfuaauauugcaL96 | 2180 | sense | 21 |
| UGCAAUAUUAUCAGCCAAAGUUU | 1085 | usGfscaaUfaUfUfaucaGfcCfaaagususu | 2181 | antisense | 23 |
| AAGAAACUUUGGCUGAUAAUA | 1086 | asasgaaaCfuUfUfGfgcugauaauaL96 | 2182 | sense | 21 |
| UAUUAUCAGCCAAAGUUUCUUCA | 1087 | usAfsuuaUfcAfGfccaaAfgUfuucuuscsa | 2183 | antisense | 23 |
| GAAGAAACUUUGGCUGAUAAU | 1088 | gsasagaaAfcUfUfUfggcugauaauL96 | 2184 | sense | 21 |
| AUUAUCAGCCAAAGUUUCUUCAU | 1089 | asUfsuauCfaGfCfcaaaGfuUfucuucsasu | 2185 | antisense | 23 |
| AAAUGGCUGAGAAGACUGACA | 1090 | asasauggCfuGfAfGfaagacugacaL96 | 2186 | sense | 21 |
| UGUCAGUCUUCUCAGCCAUUUGA | 1091 | usGfsucaGfuCfUfucucAfgCfcauuusgsa | 2187 | antisense | 23 |
| AAUGGCUGAGAAGACUGACAU | 1092 | asasuggcUfgAfGfAfagacugacauL96 | 2188 | sense | 21 |
| AUGUCAGUCUUCUCAGCCAUUUG | 1093 | asUfsgucAfgUfCfuucuCfaGfccauususg | 2189 | antisense | 23 |
| UAUCAAAUGGCUGAGAAGACU | 1094 | usasucaaAfuGfGfCfugagaagacuL96 | 2190 | sense | 21 |
| AGUCUUCUCAGCCAUUUGAUAUC | 1095 | asGfsucuUfcUfCfagccAfuUfugauasusc | 2191 | antisense | 23 |
| AUAUCAAAUGGCUGAGAAGAC | 1096 | asusaucaAfaUfGfGfcugagaagacL96 | 2192 | sense | 21 |
| GUCUUCUCAGCCAUUUGAUAUCU | 1097 | gsUfscuuCfuCfAfgccaUfuUfgauauscsu | 2193 | antisense | 23 |
| GUGGUUCUUAAAUUGUAAGCU | 1098 | gsusgguuCfuUfAfAfauuguaagcuL96 | 2194 | sense | 21 |
| AGCUUACAAUUUAAGAACCACUG | 1099 | asGfscuuAfcAfAfuuuaAfgAfaccacsusg | 2195 | antisense | 23 |
| UGGUUCUUAAAUUGUAAGCUC | 1100 | usgsguucUfuAfAfAfuuguaagcucL96 | 2196 | sense | 21 |
| GAGCUUACAAUUUAAGAACCACU | 1101 | gsAfsgcuUfaCfAfauuuAfaGfaaccascsu | 2197 | antisense | 23 |
| AACAGUGGUUCUUAAAUUGUA | 1102 | asascaguGfgUfUfCfuuaaauuguaL96 | 2198 | sense | 21 |
| UACAAUUUAAGAACCACUGUUUU | 1103 | usAfscaaUfuUfAfagaaCfcAfcuguususu | 2199 | antisense | 23 |
| AAACAGUGGUUCUUAAAUUGU | 1104 | asasacagUfgGfUfUfcuuaaauuguL96 | 2200 | sense | 21 |
| ACAAUUUAAGAACCACUGUUUUA | 1105 | asCfsaauUfuAfAfgaacCfaCfuguuususa | 2201 | antisense | 23 |
| AAGUCAUCGACAAGACAUUGG | 1106 | asasgucaUfcGfAfCfaagacauuggL96 | 2202 | sense | 21 |
| CCAAUGUCUUGUCGAUGACUUUC | 1107 | csCfsaauGfuCfUfugucGfaUfgacuususc | 2203 | antisense | 23 |
| AGUCAUCGACAAGACAUUGGU | 1108 | asgsucauCfgAfCfAfagacauugguL96 | 2204 | sense | 21 |
| ACCAAUGUCUUGUCGAUGACUUU | 1109 | asCfscaaUfgUfCfuuguCfgAfugacususu | 2205 | antisense | 23 |
| GUGAAAGUCAUCGACAAGACA | 1110 | gsusgaaaGfuCfAfUfcgacaagacaL96 | 2206 | sense | 21 |
| UGUCUUGUCGAUGACUUUCACAU | 1111 | usGfsucuUfgUfCfgaugAfcUfuucacsasu | 2207 | antisense | 23 |
| UGUGAAAGUCAUCGACAAGAC | 1112 | usgsugaaAfgUfCfAfucgacaagacL96 | 2208 | sense | 21 |
| GUCUUGUCGAUGACUUUCACAUU | 1113 | gsUfscuuGfuCfGfaugaCfuUfucacasusu | 2209 | antisense | 23 |
| GAUAAUAUUGCAGCAUUUUCC | 1114 | gsasuaauAfuUfGfCfagcauuuuccL96 | 2210 | sense | 21 |
| GGAAAAUGCUGCAAUAUUAUCAG | 1115 | gsGfsaaaAfuGfCfugcaAfuAfuuaucsasg | 2211 | antisense | 23 |
| AUAAUAUUGCAGCAUUUUCCA | 1116 | asusaauaUfuGfCfAfgcauuuuccaL96 | 2212 | sense | 21 |
| UGGAAAAUGCUGCAAUAUUAUCA | 1117 | usGfsgaaAfaUfGfcugcAfaUfauuauscsa | 2213 | antisense | 23 |
| GGCUGAUAAUAUUGCAGCAUU | 1118 | gsgscugaUfaAfUfAfuugcagcauuL96 | 2214 | sense | 21 |
| AAUGCUGCAAUAUUAUCAGCCAA | 1119 | asAfsugcUfgCfAfauauUfaUfcagccsasa | 2215 | antisense | 23 |
| UGGCUGAUAAUAUUGCAGCAU | 1120 | usgsgcugAfuAfAfUfauugcagcauL96 | 2216 | sense | 21 |
| AUGCUGCAAUAUUAUCAGCCAAA | 1121 | asUfsgcuGfcAfAfuauuAfuCfagccasasa | 2217 | antisense | 23 |
| GCUAAUUUGUAUCAAUGAUUA | 1122 | gscsuaauUfuGfUfAfucaaugauuaL96 | 2218 | sense | 21 |
| UAAUCAUUGAUACAAAUUAGCCG | 1123 | usAfsaucAfuUfGfauacAfaAfuuagcscsg | 2219 | antisense | 23 |
| CUAAUUUGUAUCAAUGAUUAU | 1124 | csusaauuUfgUfAfUfcaaugauuauL96 | 2220 | sense | 21 |
| AUAAUCAUUGAUACAAAUUAGCC | 1125 | asUfsaauCfaUfUfgauaCfaAfauuagscsc | 2221 | antisense | 23 |
| CCCGGCUAAUUUGUAUCAAUG | 1126 | cscscggcUfaAfUfUfuguaucaaugL96 | 2222 | sense | 21 |
| CAUUGAUACAAAUUAGCCGGGGG | 1127 | csAfsuugAfuAfCfaaauUfaGfccgggsgsg | 2223 | antisense | 23 |
| CCCCGGCUAAUUUGUAUCAAU | 1128 | cscsccggCfuAfAfUfuuguaucaauL96 | 2224 | sense | 21 |
| AUUGAUACAAAUUAGCCGGGGGA | 1129 | asUfsugaUfaCfAfaauuAfgCfcggggsgsa | 2225 | antisense | 23 |
| UAAUUGGUGAUACUUCUUUGA | 1130 | usasauugGfuGfAfUfacuucuuugaL96 | 2226 | sense | 21 |
| UCAAAGAAGUAUCACCAAUUACC | 1131 | usCfsaaaGfaAfGfuaucAfcCfaauuascsc | 2227 | antisense | 23 |
| AAUUGGUGAUACUUCUUUGAA | 1132 | asasuuggUfgAfUfAfcuucuuugaaL96 | 2228 | sense | 21 |
| UUCAAAGAAGUAUCACCAAUUAC | 1133 | usUfscaaAfgAfAfguauCfaCfcaauusasc | 2229 | antisense | 23 |
| GCGGUAAUUGGUGAUACUUCU | 1134 | gscsgguaAfuUfGfGfugauacuucuL96 | 2230 | sense | 21 |
| AGAAGUAUCACCAAUUACCGCCA | 1135 | asGfsaagUfaUfCfaccaAfuUfaccgcscsa | 2231 | antisense | 23 |
| GGCGGUAAUUGGUGAUACUUC | 1136 | gsgscgguAfaUfUfGfgugauacuucL96 | 2232 | sense | 21 |
| GAAGUAUCACCAAUUACCGCCAC | 1137 | gsAfsaguAfuCfAfccaaUfuAfccgccsasc | 2233 | antisense | 23 |
| CAGUGGUUCUUAAAUUGUAAG | 1138 | csasguggUfuCfUfUfaaauuguaagL96 | 2234 | sense | 21 |
| CUUACAAUUUAAGAACCACUGUU | 1139 | csUfsuacAfaUfUfuaagAfaCfcacugsusu | 2235 | antisense | 23 |
| AGUGGUUCUUAAAUUGUAAGC | 1140 | asgsugguUfcUfUfAfaauuguaagcL96 | 2236 | sense | 21 |
| GCUUACAAUUUAAGAACCACUGU | 1141 | gsCfsuuaCfaAfUfuuaaGfaAfccacusgsu | 2237 | antisense | 23 |
| AAAACAGUGGUUCUUAAAUUG | 1142 | asasaacaGfuGfGfUfucuuaaauugL96 | 2238 | sense | 21 |
| CAAUUUAAGAACCACUGUUUUAA | 1143 | csAfsauuUfaAfGfaaccAfcUfguuuusasa | 2239 | antisense | 23 |
| UAAAACAGUGGUUCUUAAAUU | 1144 | usasaaacAfgUfGfGfuucuuaaauuL96 | 2240 | sense | 21 |
| AAUUUAAGAACCACUGUUUUAAA | 1145 | asAfsuuuAfaGfAfaccaCfuGfuuuuasasa | 2241 | antisense | 23 |
| ACCUGUAUUCUGUUUACAUGU | 1146 | ascscuguAfuUfCfUfguuuacauguL96 | 2242 | sense | 21 |
| ACAUGUAAACAGAAUACAGGUUA | 1147 | asCfsaugUfaAfAfcagaAfuAfcaggususa | 2243 | antisense | 23 |
| CCUGUAUUCUGUUUACAUGUC | 1148 | cscsuguaUfuCfUfGfuuuacaugucL96 | 2244 | sense | 21 |
| GACAUGUAAACAGAAUACAGGUU | 1149 | gsAfscauGfuAfAfacagAfaUfacaggsusu | 2245 | antisense | 23 |
| AUUAACCUGUAUUCUGUUUAC | 1150 | asusuaacCfuGfUfAfuucuguuuacL96 | 2246 | sense | 21 |
| GUAAACAGAAUACAGGUUAAUAA | 1151 | gsUfsaaaCfaGfAfauacAfgGfuuaausasa | 2247 | antisense | 23 |
| UAUUAACCUGUAUUCUGUUUA | 1152 | usasuuaaCfcUfGfUfauucuguuuaL96 | 2248 | sense | 21 |
| UAAACAGAAUACAGGUUAAUAAA | 1153 | usAfsaacAfgAfAfuacaGfgUfuaauasasa | 2249 | antisense | 23 |
| AAGAAACUUUGGCUGAUAAUA | 1154 | asasgaaaCfuUfUfGfgcugauaauaL96 | 2250 | sense | 21 |
| UAUUAUCAGCCAAAGUUUCUUCA | 1155 | usAfsuuaUfcAfGfccaaAfgUfuucuuscsa | 2251 | antisense | 23 |
| AGAAACUUUGGCUGAUAAUAU | 1156 | asgsaaacUfuUfGfGfcugauaauauL96 | 2252 | sense | 21 |
| AUAUUAUCAGCCAAAGUUUCUUC | 1157 | asUfsauuAfuCfAfgccaAfaGfuuucususc | 2253 | antisense | 23 |
| GAUGAAGAAACUUUGGCUGAU | 1158 | gsasugaaGfaAfAfCfuuuggcugauL96 | 2254 | sense | 21 |
| AUCAGCCAAAGUUUCUUCAUCAU | 1159 | asUfscagCfcAfAfaguuUfcUfucaucsasu | 2255 | antisense | 23 |
| UGAUGAAGAAACUUUGGCUGA | 1160 | usgsaugaAfgAfAfAfcuuuggcugaL96 | 2256 | sense | 21 |
| UCAGCCAAAGUUUCUUCAUCAUU | 1161 | usCfsagcCfaAfAfguuuCfuUfcaucasusu | 2257 | antisense | 23 |
| GAAAGGUGUUCAAGAUGUCCU | 1162 | gsasaaggUfgUfUfCfaagauguccuL96 | 2258 | sense | 21 |
| AGGACAUCUUGAACACCUUUCUC | 1163 | asGfsgacAfuCfUfugaaCfaCfcuuucsusc | 2259 | antisense | 23 |
| AAAGGUGUUCAAGAUGUCCUC | 1164 | asasagguGfuUfCfAfagauguccucL96 | 2260 | sense | 21 |
| GAGGACAUCUUGAACACCUUUCU | 1165 | gsAfsggaCfaUfCfuugaAfcAfccuuuscsu | 2261 | antisense | 23 |
| GGGAGAAAGGUGUUCAAGAUG | 1166 | gsgsgagaAfaGfGfUfguucaagaugL96 | 2262 | sense | 21 |
| CAUCUUGAACACCUUUCUCCCCC | 1167 | csAfsucuUfgAfAfcaccUfuUfcucccscsc | 2263 | antisense | 23 |
| GGGGAGAAAGGUGUUCAAGAU | 1168 | gsgsggagAfaAfGfGfuguucaagauL96 | 2264 | sense | 21 |
| AUCUUGAACACCUUUCUCCCCCU | 1169 | asUfscuuGfaAfCfaccuUfuCfuccccscsu | 2265 | antisense | 23 |
| AUCUUGGUGUCGAAUCAUGGG | 1170 | asuscuugGfuGfUfCfgaaucaugggL96 | 2266 | sense | 21 |
| CCCAUGAUUCGACACCAAGAUCC | 1171 | csCfscauGfaUfUfcgacAfcCfaagauscsc | 2267 | antisense | 23 |
| UCUUGGUGUCGAAUCAUGGGG | 1172 | uscsuuggUfgUfCfGfaaucauggggL96 | 2268 | sense | 21 |
| CCCCAUGAUUCGACACCAAGAUC | 1173 | csCfsccaUfgAfUfucgaCfaCfcaagasusc | 2269 | antisense | 23 |
| UGGGAUCUUGGUGUCGAAUCA | 1174 | usgsggauCfuUfGfGfugucgaaucaL96 | 2270 | sense | 21 |
| UGAUUCGACACCAAGAUCCCAUU | 1175 | usGfsauuCfgAfCfaccaAfgAfucccasusu | 2271 | antisense | 23 |
| AUGGGAUCUUGGUGUCGAAUC | 1176 | asusgggaUfcUfUfGfgugucgaaucL96 | 2272 | sense | 21 |
| GAUUCGACACCAAGAUCCCAUUC | 1177 | gsAfsuucGfaCfAfccaaGfaUfcccaususc | 2273 | antisense | 23 |
| GCUACAAGGCCAUAUUUGUGA | 1178 | gscsuacaAfgGfCfCfauauuugugaL96 | 2274 | sense | 21 |
| UCACAAAUAUGGCCUUGUAGCCC | 1179 | usCfsacaAfaUfAfuggcCfuUfguagcscsc | 2275 | antisense | 23 |
| CUACAAGGCCAUAUUUGUGAC | 1180 | csusacaaGfgCfCfAfuauuugugacL96 | 2276 | sense | 21 |
| GUCACAAAUAUGGCCUUGUAGCC | 1181 | gsUfscacAfaAfUfauggCfcUfuguagscsc | 2277 | antisense | 23 |
| AUGGGCUACAAGGCCAUAUUU | 1182 | asusgggcUfaCfAfAfggccauauuuL96 | 2278 | sense | 21 |
| AAAUAUGGCCUUGUAGCCCAUCU | 1183 | asAfsauaUfgGfCfcuugUfaGfcccauscsu | 2279 | antisense | 23 |
| GAUGGGCUACAAGGCCAUAUU | 1184 | gsasugggCfuAfCfAfaggccauauuL96 | 2280 | sense | 21 |
| AAUAUGGCCUUGUAGCCCAUCUU | 1185 | asAfsuauGfgCfCfuuguAfgCfccaucsusu | 2281 | antisense | 23 |
| ACUGGAGAGAAUUGGAAUGGG | 1186 | ascsuggaGfaGfAfAfuuggaaugggL96 | 2282 | sense | 21 |
| CCCAUUCCAAUUCUCUCCAGUGC | 1187 | csCfscauUfcCfAfauucUfcUfccagusgsc | 2283 | antisense | 23 |
| CUGGAGAGAAUUGGAAUGGGU | 1188 | csusggagAfgAfAfUfuggaauggguL96 | 2284 | sense | 21 |
| ACCCAUUCCAAUUCUCUCCAGUG | 1189 | asCfsccaUfuCfCfaauuCfuCfuccagsusg | 2285 | antisense | 23 |
| UAGCACUGGAGAGAAUUGGAA | 1190 | usasgcacUfgGfAfGfagaauuggaaL96 | 2286 | sense | 21 |
| UUCCAAUUCUCUCCAGUGCUACC | 1191 | usUfsccaAfuUfCfucucCfaGfugcuascsc | 2287 | antisense | 23 |
| GUAGCACUGGAGAGAAUUGGA | 1192 | gsusagcaCfuGfGfAfgagaauuggaL96 | 2288 | sense | 21 |
| UCCAAUUCUCUCCAGUGCUACCU | 1193 | usCfscaaUfuCfUfcuccAfgUfgcuacscsu | 2289 | antisense | 23 |
| ACAGUGGACACACCUUACCUG | 1194 | ascsagugGfaCfAfCfaccuuaccugL96 | 2290 | sense | 21 |
| CAGGUAAGGUGUGUCCACUGUCA | 1195 | csAfsgguAfaGfGfugugUfcCfacuguscsa | 2291 | antisense | 23 |
| CAGUGGACACACCUUACCUGG | 1196 | csasguggAfcAfCfAfccuuaccuggL96 | 2292 | sense | 21 |
| CCAGGUAAGGUGUGUCCACUGUC | 1197 | csCfsaggUfaAfGfguguGfuCfcacugsusc | 2293 | antisense | 23 |
| UGUGACAGUGGACACACCUUA | 1198 | usgsugacAfgUfGfGfacacaccuuaL96 | 2294 | sense | 21 |
| UAAGGUGUGUCCACUGUCACAAA | 1199 | usAfsaggUfgUfGfuccaCfuGfucacasasa | 2295 | antisense | 23 |
| UUGUGACAGUGGACACACCUU | 1200 | ususgugaCfaGfUfGfgacacaccuuL96 | 2296 | sense | 21 |
| AAGGUGUGUCCACUGUCACAAAU | 1201 | asAfsgguGfuGfUfccacUfgUfcacaasasu | 2297 | antisense | 23 |
| GAAGACUGACAUCAUUGCCAA | 1202 | gsasagacUfgAfCfAfucauugccaaL96 | 2298 | sense | 21 |
| UUGGCAAUGAUGUCAGUCUUCUC | 1203 | usUfsggcAfaUfGfauguCfaGfucuucsusc | 2299 | antisense | 23 |
| AAGACUGACAUCAUUGCCAAU | 1204 | asasgacuGfaCfAfUfcauugccaauL96 | 2300 | sense | 21 |
| AUUGGCAAUGAUGUCAGUCUUCU | 1205 | asUfsuggCfaAfUfgaugUfcAfgucuuscsu | 2301 | antisense | 23 |
| CUGAGAAGACUGACAUCAUUG | 1206 | csusgagaAfgAfCfUfgacaucauugL96 | 2302 | sense | 21 |
| CAAUGAUGUCAGUCUUCUCAGCC | 1207 | csAfsaugAfuGfUfcaguCfuUfcucagscsc | 2303 | antisense | 23 |
| GCUGAGAAGACUGACAUCAUU | 1208 | gscsugagAfaGfAfCfugacaucauuL96 | 2304 | sense | 21 |
| AAUGAUGUCAGUCUUCUCAGCCA | 1209 | asAfsugaUfgUfCfagucUfuCfucagcscsa | 2305 | antisense | 23 |
| GCUCAGGUUCAAAGUGUUGGU | 1210 | gscsucagGfuUfCfAfaaguguugguL96 | 2306 | sense | 21 |
| ACCAACACUUUGAACCUGAGCUU | 1211 | asCfscaaCfaCfUfuugaAfcCfugagcsusu | 2307 | antisense | 23 |
| CUCAGGUUCAAAGUGUUGGUA | 1212 | csuscaggUfuCfAfAfaguguugguaL96 | 2308 | sense | 21 |
| UACCAACACUUUGAACCUGAGCU | 1213 | usAfsccaAfcAfCfuuugAfaCfcugagscsu | 2309 | antisense | 23 |
| GUAAGCUCAGGUUCAAAGUGU | 1214 | gsusaagcUfcAfGfGfuucaaaguguL96 | 2310 | sense | 21 |
| ACACUUUGAACCUGAGCUUACAA | 1215 | asCfsacuUfuGfAfaccuGfaGfcuuacsasa | 2311 | antisense | 23 |
| UGUAAGCUCAGGUUCAAAGUG | 1216 | usgsuaagCfuCfAfGfguucaaagugL96 | 2312 | sense | 21 |
| CACUUUGAACCUGAGCUUACAAU | 1217 | csAfscuuUfgAfAfccugAfgCfuuacasasu | 2313 | antisense | 23 |
| AUGUAUUACUUGACAAAGAGA | 1218 | asusguauUfaCfUfUfgacaaagagaL96 | 2314 | sense | 21 |
| UCUCUUUGUCAAGUAAUACAUGC | 1219 | usCfsucuUfuGfUfcaagUfaAfuacausgsc | 2315 | antisense | 23 |
| UGUAUUACUUGACAAAGAGAC | 1220 | usgsuauuAfcUfUfGfacaaagagacL96 | 2316 | sense | 21 |
| GUCUCUUUGUCAAGUAAUACAUG | 1221 | gsUfscucUfuUfGfucaaGfuAfauacasusg | 2317 | antisense | 23 |
| CAGCAUGUAUUACUUGACAAA | 1222 | csasgcauGfuAfUfUfacuugacaaaL96 | 2318 | sense | 21 |
| UUUGUCAAGUAAUACAUGCUGAA | 1223 | usUfsuguCfaAfGfuaauAfcAfugcugsasa | 2319 | antisense | 23 |
| UCAGCAUGUAUUACUUGACAA | 1224 | uscsagcaUfgUfAfUfuacuugacaaL96 | 2320 | sense | 21 |
| UUGUCAAGUAAUACAUGCUGAAA | 1225 | usUfsgucAfaGfUfaauaCfaUfgcugasasa | 2321 | antisense | 23 |
| CUGCAACUGUAUAUCUACAAG | 1226 | csusgcaaCfuGfUfAfuaucuacaagL96 | 2322 | sense | 21 |
| CUUGUAGAUAUACAGUUGCAGCC | 1227 | csUfsuguAfgAfUfauacAfgUfugcagscsc | 2323 | antisense | 23 |
| UGCAACUGUAUAUCUACAAGG | 1228 | usgscaacUfgUfAfUfaucuacaaggL96 | 2324 | sense | 21 |
| CCUUGUAGAUAUACAGUUGCAGC | 1229 | csCfsuugUfaGfAfuauaCfaGfuugcasgsc | 2325 | antisense | 23 |
| UUGGCUGCAACUGUAUAUCUA | 1230 | ususggcuGfcAfAfCfuguauaucuaL96 | 2326 | sense | 21 |
| UAGAUAUACAGUUGCAGCCAACG | 1231 | usAfsgauAfuAfCfaguuGfcAfgccaascsg | 2327 | antisense | 23 |
| GUUGGCUGCAACUGUAUAUCU | 1232 | gsusuggcUfgCfAfAfcuguauaucuL96 | 2328 | sense | 21 |
| AGAUAUACAGUUGCAGCCAACGA | 1233 | asGfsauaUfaCfAfguugCfaGfccaacsgsa | 2329 | antisense | 23 |
| CAAAUGAUGAAGAAACUUUGG | 1234 | csasaaugAfuGfAfAfgaaacuuuggL96 | 2330 | sense | 21 |
| CCAAAGUUUCUUCAUCAUUUGCC | 1235 | csCfsaaaGfuUfUfcuucAfuCfauuugscsc | 2331 | antisense | 23 |
| AAAUGAUGAAGAAACUUUGGC | 1236 | asasaugaUfgAfAfGfaaacuuuggcL96 | 2332 | sense | 21 |
| GCCAAAGUUUCUUCAUCAUUUGC | 1237 | gsCfscaaAfgUfUfucuuCfaUfcauuusgsc | 2333 | antisense | 23 |
| GGGGCAAAUGAUGAAGAAACU | 1238 | gsgsggcaAfaUfGfAfugaagaaacuL96 | 2334 | sense | 21 |
| AGUUUCUUCAUCAUUUGCCCCAG | 1239 | asGfsuuuCfuUfCfaucaUfuUfgccccsasg | 2335 | antisense | 23 |
| UGGGGCAAAUGAUGAAGAAAC | 1240 | usgsgggcAfaAfUfGfaugaagaaacL96 | 2336 | sense | 21 |
| GUUUCUUCAUCAUUUGCCCCAGA | 1241 | gsUfsuucUfuCfAfucauUfuGfccccasgsa | 2337 | antisense | 23 |
| CAAAGGGUGUCGUUCUUUUCC | 1242 | csasaaggGfuGfUfCfguucuuuuccL96 | 2338 | sense | 21 |
| GGAAAAGAACGACACCCUUUGUA | 1243 | gsGfsaaaAfgAfAfcgacAfcCfcuuugsusa | 2339 | antisense | 23 |
| AAAGGGUGUCGUUCUUUUCCA | 1244 | asasagggUfgUfCfGfuucuuuuccaL96 | 2340 | sense | 21 |
| UGGAAAAGAACGACACCCUUUGU | 1245 | usGfsgaaAfaGfAfacgaCfaCfccuuusgsu | 2341 | antisense | 23 |
| AAUACAAAGGGUGUCGUUCUU | 1246 | asasuacaAfaGfGfGfugucguucuuL96 | 2342 | sense | 21 |
| AAGAACGACACCCUUUGUAUUGA | 1247 | asAfsgaaCfgAfCfacccUfuUfguauusgsa | 2343 | antisense | 23 |
| CAAUACAAAGGGUGUCGUUCU | 1248 | csasauacAfaAfGfGfgugucguucuL96 | 2344 | sense | 21 |
| AGAACGACACCCUUUGUAUUGAA | 1249 | asGfsaacGfaCfAfcccuUfuGfuauugsasa | 2345 | antisense | 23 |
| AAAGGCACUGAUGUUCUGAAA | 1250 | asasaggcAfcUfGfAfuguucugaaaL96 | 2346 | sense | 21 |
| UUUCAGAACAUCAGUGCCUUUCC | 1251 | usUfsucaGfaAfCfaucaGfuGfccuuuscsc | 2347 | antisense | 23 |
| AAGGCACUGAUGUUCUGAAAG | 1252 | asasggcaCfuGfAfUfguucugaaagL96 | 2348 | sense | 21 |
| CUUUCAGAACAUCAGUGCCUUUC | 1253 | csUfsuucAfgAfAfcaucAfgUfgccuususc | 2349 | antisense | 23 |
| GCGGAAAGGCACUGAUGUUCU | 1254 | gscsggaaAfgGfCfAfcugauguucuL96 | 2350 | sense | 21 |
| AGAACAUCAGUGCCUUUCCGCAC | 1255 | asGfsaacAfuCfAfgugcCfuUfuccgcsasc | 2351 | antisense | 23 |
| UGCGGAAAGGCACUGAUGUUC | 1256 | usgscggaAfaGfGfCfacugauguucL96 | 2352 | sense | 21 |
| GAACAUCAGUGCCUUUCCGCACA | 1257 | gsAfsacaUfcAfGfugccUfuUfccgcascsa | 2353 | antisense | 23 |
| AAGGAUGCUCCGGAAUGUUGC | 1258 | asasggauGfcUfCfCfggaauguugcL96 | 2354 | sense | 21 |
| GCAACAUUCCGGAGCAUCCUUGG | 1259 | gsCfsaacAfuUfCfcggaGfcAfuccuusgsg | 2355 | antisense | 23 |
| AGGAUGCUCCGGAAUGUUGCU | 1260 | asgsgaugCfuCfCfGfgaauguugcuL96 | 2356 | sense | 21 |
| AGCAACAUUCCGGAGCAUCCUUG | 1261 | asGfscaaCfaUfUfccggAfgCfauccususg | 2357 | antisense | 23 |
| AUCCAAGGAUGCUCCGGAAUG | 1262 | asusccaaGfgAfUfGfcuccggaaugL96 | 2358 | sense | 21 |
| CAUUCCGGAGCAUCCUUGGAUAC | 1263 | csAfsuucCfgGfAfgcauCfcUfuggausasc | 2359 | antisense | 23 |
| UAUCCAAGGAUGCUCCGGAAU | 1264 | usasuccaAfgGfAfUfgcuccggaauL96 | 2360 | sense | 21 |
| AUUCCGGAGCAUCCUUGGAUACA | 1265 | asUfsuccGfgAfGfcaucCfuUfggauascsa | 2361 | antisense | 23 |
| AAUGGGUGGCGGUAAUUGGUG | 1266 | asasugggUfgGfCfGfguaauuggugL96 | 2362 | sense | 21 |
| CACCAAUUACCGCCACCCAUUCC | 1267 | csAfsccaAfuUfAfccgcCfaCfccauuscsc | 2363 | antisense | 23 |
| AUGGGUGGCGGUAAUUGGUGA | 1268 | asusggguGfgCfGfGfuaauuggugaL96 | 2364 | sense | 21 |
| UCACCAAUUACCGCCACCCAUUC | 1269 | usCfsaccAfaUfUfaccgCfcAfcccaususc | 2365 | antisense | 23 |
| UUGGAAUGGGUGGCGGUAAUU | 1270 | ususggaaUfgGfGfUfggcgguaauuL96 | 2366 | sense | 21 |
| AAUUACCGCCACCCAUUCCAAUU | 1271 | asAfsuuaCfcGfCfcaccCfaUfuccaasusu | 2367 | antisense | 23 |
| AUUGGAAUGGGUGGCGGUAAU | 1272 | asusuggaAfuGfGfGfuggcgguaauL96 | 2368 | sense | 21 |
| AUUACCGCCACCCAUUCCAAUUC | 1273 | asUfsuacCfgCfCfacccAfuUfccaaususc | 2369 | antisense | 23 |
| GGAAAGGCACUGAUGUUCUGA | 1274 | gsgsaaagGfcAfCfUfgauguucugaL96 | 2370 | sense | 21 |
| UCAGAACAUCAGUGCCUUUCCGC | 1275 | usCfsagaAfcAfUfcaguGfcCfuuuccsgsc | 2371 | antisense | 23 |
| GAAAGGCACUGAUGUUCUGAA | 1276 | gsasaaggCfaCfUfGfauguucugaaL96 | 2372 | sense | 21 |
| UUCAGAACAUCAGUGCCUUUCCG | 1277 | usUfscagAfaCfAfucagUfgCfcuuucscsg | 2373 | antisense | 23 |
| GUGCGGAAAGGCACUGAUGUU | 1278 | gsusgcggAfaAfGfGfcacugauguuL96 | 2374 | sense | 21 |
| AACAUCAGUGCCUUUCCGCACAC | 1279 | asAfscauCfaGfUfgccuUfuCfcgcacsasc | 2375 | antisense | 23 |
| UGUGCGGAAAGGCACUGAUGU | 1280 | usgsugcgGfaAfAfGfgcacugauguL96 | 2376 | sense | 21 |
| ACAUCAGUGCCUUUCCGCACACC | 1281 | asCfsaucAfgUfGfccuuUfcCfgcacascsc | 2377 | antisense | 23 |
| AAUUGUAAGCUCAGGUUCAAA | 1282 | asasuuguAfaGfCfUfcagguucaaaL96 | 2378 | sense | 21 |
| UUUGAACCUGAGCUUACAAUUUA | 1283 | usUfsugaAfcCfUfgagcUfuAfcaauususa | 2379 | antisense | 23 |
| AUUGUAAGCUCAGGUUCAAAG | 1284 | asusuguaAfgCfUfCfagguucaaagL96 | 2380 | sense | 21 |
| CUUUGAACCUGAGCUUACAAUUU | 1285 | csUfsuugAfaCfCfugagCfuUfacaaususu | 2381 | antisense | 23 |
| CUUAAAUUGUAAGCUCAGGUU | 1286 | csusuaaaUfuGfUfAfagcucagguuL96 | 2382 | sense | 21 |
| AACCUGAGCUUACAAUUUAAGAA | 1287 | asAfsccuGfaGfCfuuacAfaUfuuaagsasa | 2383 | antisense | 23 |
| UCUUAAAUUGUAAGCUCAGGU | 1288 | uscsuuaaAfuUfGfUfaagcucagguL96 | 2384 | sense | 21 |
| ACCUGAGCUUACAAUUUAAGAAC | 1289 | asCfscugAfgCfUfuacaAfuUfuaagasasc | 2385 | antisense | 23 |
| GCAAACACUAAGGUGAAAAGA | 1290 | gscsaaacAfcUfAfAfggugaaaagaL96 | 2386 | sense | 21 |
| UCUUUUCACCUUAGUGUUUGCUA | 1291 | usCfsuuuUfcAfCfcuuaGfuGfuuugcsusa | 2387 | antisense | 23 |
| CAAACACUAAGGUGAAAAGAU | 1292 | csasaacaCfuAfAfGfgugaaaagauL96 | 2388 | sense | 21 |
| AUCUUUUCACCUUAGUGUUUGCU | 1293 | asUfscuuUfuCfAfccuuAfgUfguuugscsu | 2389 | antisense | 23 |
| GGUAGCAAACACUAAGGUGAA | 1294 | gsgsuagcAfaAfCfAfcuaaggugaaL96 | 2390 | sense | 21 |
| UUCACCUUAGUGUUUGCUACCUC | 1295 | usUfscacCfuUfAfguguUfuGfcuaccsusc | 2391 | antisense | 23 |
| AGGUAGCAAACACUAAGGUGA | 1296 | asgsguagCfaAfAfCfacuaaggugaL96 | 2392 | sense | 21 |
| UCACCUUAGUGUUUGCUACCUCC | 1297 | usCfsaccUfuAfGfuguuUfgCfuaccuscsc | 2393 | antisense | 23 |
| AGGUAGCAAACACUAAGGUGA | 1298 | asgsguagCfaAfAfCfacuaaggugaL96 | 2394 | sense | 21 |
| UCACCUUAGUGUUUGCUACCUCC | 1299 | usCfsaccUfuAfGfuguuUfgCfuaccuscsc | 2395 | antisense | 23 |
| GGUAGCAAACACUAAGGUGAA | 1300 | gsgsuagcAfaAfCfAfcuaaggugaaL96 | 2396 | sense | 21 |
| UUCACCUUAGUGUUUGCUACCUC | 1301 | usUfscacCfuUfAfguguUfuGfcuaccsusc | 2397 | antisense | 23 |
| UUGGAGGUAGCAAACACUAAG | 1302 | ususggagGfuAfGfCfaaacacuaagL96 | 2398 | sense | 21 |
| CUUAGUGUUUGCUACCUCCAAUU | 1303 | csUfsuagUfgUfUfugcuAfcCfuccaasusu | 2399 | antisense | 23 |
| AUUGGAGGUAGCAAACACUAA | 1304 | asusuggaGfgUfAfGfcaaacacuaaL96 | 2400 | sense | 21 |
| UUAGUGUUUGCUACCUCCAAUUU | 1305 | usUfsaguGfuUfUfgcuaCfcUfccaaususu | 2401 | antisense | 23 |
| UAAAGUGCUGUAUCCUUUAGU | 1306 | usasaaguGfcUfGfUfauccuuuaguL96 | 2402 | sense | 21 |
| ACUAAAGGAUACAGCACUUUAGC | 1307 | asCfsuaaAfgGfAfuacaGfcAfcuuuasgsc | 2403 | antisense | 23 |
| AAAGUGCUGUAUCCUUUAGUA | 1308 | asasagugCfuGfUfAfuccuuuaguaL96 | 2404 | sense | 21 |
| UACUAAAGGAUACAGCACUUUAG | 1309 | usAfscuaAfaGfGfauacAfgCfacuuusasg | 2405 | antisense | 23 |
| AGGCUAAAGUGCUGUAUCCUU | 1310 | asgsgcuaAfaGfUfGfcuguauccuuL96 | 2406 | sense | 21 |
| AAGGAUACAGCACUUUAGCCUGC | 1311 | asAfsggaUfaCfAfgcacUfuUfagccusgsc | 2407 | antisense | 23 |
| CAGGCUAAAGUGCUGUAUCCU | 1312 | csasggcuAfaAfGfUfgcuguauccuL96 | 2408 | sense | 21 |
| AGGAUACAGCACUUUAGCCUGCC | 1313 | asGfsgauAfcAfGfcacuUfuAfgccugscsc | 2409 | antisense | 23 |
| AAGACAUUGGUGAGGAAAAAU | 1314 | asasgacaUfuGfGfUfgaggaaaaauL96 | 2410 | sense | 21 |
| AUUUUUCCUCACCAAUGUCUUGU | 1315 | asUfsuuuUfcCfUfcaccAfaUfgucuusgsu | 2411 | antisense | 23 |
| AGACAUUGGUGAGGAAAAAUC | 1316 | asgsacauUfgGfUfGfaggaaaaaucL96 | 2412 | sense | 21 |
| GAUUUUUCCUCACCAAUGUCUUG | 1317 | gsAfsuuuUfuCfCfucacCfaAfugucususg | 2413 | antisense | 23 |
| CGACAAGACAUUGGUGAGGAA | 1318 | csgsacaaGfaCfAfUfuggugaggaaL96 | 2414 | sense | 21 |
| UUCCUCACCAAUGUCUUGUCGAU | 1319 | usUfsccuCfaCfCfaaugUfcUfugucgsasu | 2415 | antisense | 23 |
| UCGACAAGACAUUGGUGAGGA | 1320 | uscsgacaAfgAfCfAfuuggugaggaL96 | 2416 | sense | 21 |
| UCCUCACCAAUGUCUUGUCGAUG | 1321 | usCfscucAfcCfAfauguCfuUfgucgasusg | 2417 | antisense | 23 |
| AAGAUGUCCUCGAGAUACUAA | 1322 | asasgaugUfcCfUfCfgagauacuaaL96 | 2418 | sense | 21 |
| UUAGUAUCUCGAGGACAUCUUGA | 1323 | usUfsaguAfuCfUfcgagGfaCfaucuusgsa | 2419 | antisense | 23 |
| AGAUGUCCUCGAGAUACUAAA | 1324 | asgsauguCfcUfCfGfagauacuaaaL96 | 2420 | sense | 21 |
| UUUAGUAUCUCGAGGACAUCUUG | 1325 | usUfsuagUfaUfCfucgaGfgAfcaucususg | 2421 | antisense | 23 |
| GUUCAAGAUGUCCUCGAGAUA | 1326 | gsusucaaGfaUfGfUfccucgagauaL96 | 2422 | sense | 21 |
| UAUCUCGAGGACAUCUUGAACAC | 1327 | usAfsucuCfgAfGfgacaUfcUfugaacsasc | 2423 | antisense | 23 |
| UGUUCAAGAUGUCCUCGAGAU | 1328 | usgsuucaAfgAfUfGfuccucgagauL96 | 2424 | sense | 21 |
| AUCUCGAGGACAUCUUGAACACC | 1329 | asUfscucGfaGfGfacauCfuUfgaacascsc | 2425 | antisense | 23 |
| GAGAAAGGUGUUCAAGAUGUC | 1330 | gsasgaaaGfgUfGfUfucaagaugucL96 | 2426 | sense | 21 |
| GACAUCUUGAACACCUUUCUCCC | 1331 | gsAfscauCfuUfGfaacaCfcUfuucucscsc | 2427 | antisense | 23 |
| AGAAAGGUGUUCAAGAUGUCC | 1332 | asgsaaagGfuGfUfUfcaagauguccL96 | 2428 | sense | 21 |
| GGACAUCUUGAACACCUUUCUCC | 1333 | gsGfsacaUfcUfUfgaacAfcCfuuucuscsc | 2429 | antisense | 23 |
| GGGGGAGAAAGGUGUUCAAGA | 1334 | gsgsgggaGfaAfAfGfguguucaagaL96 | 2430 | sense | 21 |
| UCUUGAACACCUUUCUCCCCCUG | 1335 | usCfsuugAfaCfAfccuuUfcUfcccccsusg | 2431 | antisense | 23 |
| AGGGGGAGAAAGGUGUUCAAG | 1336 | asgsggggAfgAfAfAfgguguucaagL96 | 2432 | sense | 21 |
| CUUGAACACCUUUCUCCCCCUGG | 1337 | csUfsugaAfcAfCfcuuuCfuCfccccusgsg | 2433 | antisense | 23 |
| GCUGGGAAGAUAUCAAAUGGC | 1338 | gscsugggAfaGfAfUfaucaaauggcL96 | 2434 | sense | 21 |
| GCCAUUUGAUAUCUUCCCAGCUG | 1339 | gsCfscauUfuGfAfuaucUfuCfccagcsusg | 2435 | antisense | 23 |
| CUGGGAAGAUAUCAAAUGGCU | 1340 | csusgggaAfgAfUfAfucaaauggcuL96 | 2436 | sense | 21 |
| AGCCAUUUGAUAUCUUCCCAGCU | 1341 | asGfsccaUfuUfGfauauCfuUfcccagscsu | 2437 | antisense | 23 |
| AUCAGCUGGGAAGAUAUCAAA | 1342 | asuscagcUfgGfGfAfagauaucaaaL96 | 2438 | sense | 21 |
| UUUGAUAUCUUCCCAGCUGAUAG | 1343 | usUfsugaUfaUfCfuuccCfaGfcugausasg | 2439 | antisense | 23 |
| UAUCAGCUGGGAAGAUAUCAA | 1344 | usasucagCfuGfGfGfaagauaucaaL96 | 2440 | sense | 21 |
| UUGAUAUCUUCCCAGCUGAUAGA | 1345 | usUfsgauAfuCfUfucccAfgCfugauasgsa | 2441 | antisense | 23 |
| UCUGUCGACUUCUGUUUUAGG | 1346 | uscsugucGfaCfUfUfcuguuuuaggL96 | 2442 | sense | 21 |
| CCUAAAACAGAAGUCGACAGAUC | 1347 | csCfsuaaAfaCfAfgaagUfcGfacagasusc | 2443 | antisense | 23 |
| CUGUCGACUUCUGUUUUAGGA | 1348 | csusgucgAfcUfUfCfuguuuuaggaL96 | 2444 | sense | 21 |
| UCCUAAAACAGAAGUCGACAGAU | 1349 | usCfscuaAfaAfCfagaaGfuCfgacagsasu | 2445 | antisense | 23 |
| CAGAUCUGUCGACUUCUGUUU | 1350 | csasgaucUfgUfCfGfacuucuguuuL96 | 2446 | sense | 21 |
| AAACAGAAGUCGACAGAUCUGUU | 1351 | asAfsacaGfaAfGfucgaCfaGfaucugsusu | 2447 | antisense | 23 |
| ACAGAUCUGUCGACUUCUGUU | 1352 | ascsagauCfuGfUfCfgacuucuguuL96 | 2448 | sense | 21 |
| AACAGAAGUCGACAGAUCUGUUU | 1353 | asAfscagAfaGfUfcgacAfgAfucugususu | 2449 | antisense | 23 |
| UACUUCUUUGAAUGUAGAUUU | 1354 | usascuucUfuUfGfAfauguagauuuL96 | 2450 | sense | 21 |
| AAAUCUACAUUCAAAGAAGUAUC | 1355 | asAfsaucUfaCfAfuucaAfaGfaaguasusc | 2451 | antisense | 23 |
| ACUUCUUUGAAUGUAGAUUUC | 1356 | ascsuucuUfuGfAfAfuguagauuucL96 | 2452 | sense | 21 |
| GAAAUCUACAUUCAAAGAAGUAU | 1357 | gsAfsaauCfuAfCfauucAfaAfgaagusasu | 2453 | antisense | 23 |
| GUGAUACUUCUUUGAAUGUAG | 1358 | gsusgauaCfuUfCfUfuugaauguagL96 | 2454 | sense | 21 |
| CUACAUUCAAAGAAGUAUCACCA | 1359 | csUfsacaUfuCfAfaagaAfgUfaucacscsa | 2455 | antisense | 23 |
| GGUGAUACUUCUUUGAAUGUA | 1360 | gsgsugauAfcUfUfCfuuugaauguaL96 | 2456 | sense | 21 |
| UACAUUCAAAGAAGUAUCACCAA | 1361 | usAfscauUfcAfAfagaaGfuAfucaccsasa | 2457 | antisense | 23 |
| UGGGAAGAUAUCAAAUGGCUG | 1362 | usgsggaaGfaUfAfUfcaaauggcugL96 | 2458 | sense | 21 |
| CAGCCAUUUGAUAUCUUCCCAGC | 1363 | csAfsgccAfuUfUfgauaUfcUfucccasgsc | 2459 | antisense | 23 |
| GGGAAGAUAUCAAAUGGCUGA | 1364 | gsgsgaagAfuAfUfCfaaauggcugaL96 | 2460 | sense | 21 |
| UCAGCCAUUUGAUAUCUUCCCAG | 1365 | usCfsagcCfaUfUfugauAfuCfuucccsasg | 2461 | antisense | 23 |
| CAGCUGGGAAGAUAUCAAAUG | 1366 | csasgcugGfgAfAfGfauaucaaaugL96 | 2462 | sense | 21 |
| CAUUUGAUAUCUUCCCAGCUGAU | 1367 | csAfsuuuGfaUfAfucuuCfcCfagcugsasu | 2463 | antisense | 23 |
| UCAGCUGGGAAGAUAUCAAAU | 1368 | uscsagcuGfgGfAfAfgauaucaaauL96 | 2464 | sense | 21 |
| AUUUGAUAUCUUCCCAGCUGAUA | 1369 | asUfsuugAfuAfUfcuucCfcAfgcugasusa | 2465 | antisense | 23 |
| UCCAAAGUCUAUAUAUGACUA | 1370 | uscscaaaGfuCfUfAfuauaugacuaL96 | 2466 | sense | 21 |
| UAGUCAUAUAUAGACUUUGGAAG | 1371 | usAfsgucAfuAfUfauagAfcUfuuggasasg | 2467 | antisense | 23 |
| CCAAAGUCUAUAUAUGACUAU | 1372 | cscsaaagUfcUfAfUfauaugacuauL96 | 2468 | sense | 21 |
| AUAGUCAUAUAUAGACUUUGGAA | 1373 | asUfsaguCfaUfAfuauaGfaCfuuuggsasa | 2469 | antisense | 23 |
| UACUUCCAAAGUCUAUAUAUG | 1374 | usascuucCfaAfAfGfucuauauaugL96 | 2470 | sense | 21 |
| CAUAUAUAGACUUUGGAAGUACU | 1375 | csAfsuauAfuAfGfacuuUfgGfaaguascsu | 2471 | antisense | 23 |
| GUACUUCCAAAGUCUAUAUAU | 1376 | gsusacuuCfcAfAfAfgucuauauauL96 | 2472 | sense | 21 |
| AUAUAUAGACUUUGGAAGUACUG | 1377 | asUfsauaUfaGfAfcuuuGfgAfaguacsusg | 2473 | antisense | 23 |
| UUAUGAACAACAUGCUAAAUC | 1378 | ususaugaAfcAfAfCfaugcuaaaucL96 | 2474 | sense | 21 |
| GAUUUAGCAUGUUGUUCAUAAUC | 1379 | gsAfsuuuAfgCfAfuguuGfuUfcauaasusc | 2475 | antisense | 23 |
| UAUGAACAACAUGCUAAAUCA | 1380 | usasugaaCfaAfCfAfugcuaaaucaL96 | 2476 | sense | 21 |
| UGAUUUAGCAUGUUGUUCAUAAU | 1381 | usGfsauuUfaGfCfauguUfgUfucauasasu | 2477 | antisense | 23 |
| AUGAUUAUGAACAACAUGCUA | 1382 | asusgauuAfuGfAfAfcaacaugcuaL96 | 2478 | sense | 21 |
| UAGCAUGUUGUUCAUAAUCAUUG | 1383 | usAfsgcaUfgUfUfguucAfuAfaucaususg | 2479 | antisense | 23 |
| AAUGAUUAUGAACAACAUGCU | 1384 | asasugauUfaUfGfAfacaacaugcuL96 | 2480 | sense | 21 |
| AGCAUGUUGUUCAUAAUCAUUGA | 1385 | asGfscauGfuUfGfuucaUfaAfucauusgsa | 2481 | antisense | 23 |
| AAUUCCCCACUUCAAUACAAA | 1386 | asasuuccCfcAfCfUfucaauacaaaL96 | 2482 | sense | 21 |
| UUUGUAUUGAAGUGGGGAAUUAC | 1387 | usUfsuguAfuUfGfaaguGfgGfgaauusasc | 2483 | antisense | 23 |
| AUUCCCCACUUCAAUACAAAG | 1388 | asusucccCfaCfUfUfcaauacaaagL96 | 2484 | sense | 21 |
| CUUUGUAUUGAAGUGGGGAAUUA | 1389 | csUfsuugUfaUfUfgaagUfgGfggaaususa | 2485 | antisense | 23 |
| CUGUAAUUCCCCACUUCAAUA | 1390 | csusguaaUfuCfCfCfcacuucaauaL96 | 2486 | sense | 21 |
| UAUUGAAGUGGGGAAUUACAGAC | 1391 | usAfsuugAfaGfUfggggAfaUfuacagsasc | 2487 | antisense | 23 |
| UCUGUAAUUCCCCACUUCAAU | 1392 | uscsuguaAfuUfCfCfccacuucaauL96 | 2488 | sense | 21 |
| AUUGAAGUGGGGAAUUACAGACU | 1393 | asUfsugaAfgUfGfgggaAfuUfacagascsu | 2489 | antisense | 23 |
| UGAUGUGCGUAACAGAUUCAA | 1394 | usgsauguGfcGfUfAfacagauucaaL96 | 2490 | sense | 21 |
| UUGAAUCUGUUACGCACAUCAUC | 1395 | usUfsgaaUfcUfGfuuacGfcAfcaucasusc | 2491 | antisense | 23 |
| GAUGUGCGUAACAGAUUCAAA | 1396 | gsasugugCfgUfAfAfcagauucaaaL96 | 2492 | sense | 21 |
| UUUGAAUCUGUUACGCACAUCAU | 1397 | usUfsugaAfuCfUfguuaCfgCfacaucsasu | 2493 | antisense | 23 |
| UGGAUGAUGUGCGUAACAGAU | 1398 | usgsgaugAfuGfUfGfcguaacagauL96 | 2494 | sense | 21 |
| AUCUGUUACGCACAUCAUCCAGA | 1399 | asUfscugUfuAfCfgcacAfuCfauccasgsa | 2495 | antisense | 23 |
| CUGGAUGAUGUGCGUAACAGA | 1400 | csusggauGfaUfGfUfgcguaacagaL96 | 2496 | sense | 21 |
| UCUGUUACGCACAUCAUCCAGAC | 1401 | usCfsuguUfaCfGfcacaUfcAfuccagsasc | 2497 | antisense | 23 |
| GAAUGGGUGGCGGUAAUUGGU | 1402 | gsasauggGfuGfGfCfgguaauugguL96 | 2498 | sense | 21 |
| ACCAAUUACCGCCACCCAUUCCA | 1403 | asCfscaaUfuAfCfcgccAfcCfcauucscsa | 2499 | antisense | 23 |
| AAUGGGUGGCGGUAAUUGGUG | 1404 | asasugggUfgGfCfGfguaauuggugL96 | 2500 | sense | 21 |
| CACCAAUUACCGCCACCCAUUCC | 1405 | csAfsccaAfuUfAfccgcCfaCfccauuscsc | 2501 | antisense | 23 |
| AUUGGAAUGGGUGGCGGUAAU | 1406 | asusuggaAfuGfGfGfuggcgguaauL96 | 2502 | sense | 21 |
| AUUACCGCCACCCAUUCCAAUUC | 1407 | asUfsuacCfgCfCfacccAfuUfccaaususc | 2503 | antisense | 23 |
| AAUUGGAAUGGGUGGCGGUAA | 1408 | asasuuggAfaUfGfGfguggcgguaaL96 | 2504 | sense | 21 |
| UUACCGCCACCCAUUCCAAUUCU | 1409 | usUfsaccGfcCfAfcccaUfuCfcaauuscsu | 2505 | antisense | 23 |
| UCCGGAAUGUUGCUGAAACAG | 1410 | uscscggaAfuGfUfUfgcugaaacagL96 | 2506 | sense | 21 |
| CUGUUUCAGCAACAUUCCGGAGC | 1411 | csUfsguuUfcAfGfcaacAfuUfccggasgsc | 2507 | antisense | 23 |
| CCGGAAUGUUGCUGAAACAGA | 1412 | cscsggaaUfgUfUfGfcugaaacagaL96 | 2508 | sense | 21 |
| UCUGUUUCAGCAACAUUCCGGAG | 1413 | usCfsuguUfuCfAfgcaaCfaUfuccggsasg | 2509 | antisense | 23 |
| AUGCUCCGGAAUGUUGCUGAA | 1414 | asusgcucCfgGfAfAfuguugcugaaL96 | 2510 | sense | 21 |
| UUCAGCAACAUUCCGGAGCAUCC | 1415 | usUfscagCfaAfCfauucCfgGfagcauscsc | 2511 | antisense | 23 |
| GAUGCUCCGGAAUGUUGCUGA | 1416 | gsasugcuCfcGfGfAfauguugcugaL96 | 2512 | sense | 21 |
| UCAGCAACAUUCCGGAGCAUCCU | 1417 | usCfsagcAfaCfAfuuccGfgAfgcaucscsu | 2513 | antisense | 23 |
| UGUCCUCGAGAUACUAAAGGA | 1418 | usgsuccuCfgAfGfAfuacuaaaggaL96 | 2514 | sense | 21 |
| UCCUUUAGUAUCUCGAGGACAUC | 1419 | usCfscuuUfaGfUfaucuCfgAfggacasusc | 2515 | antisense | 23 |
| GUCCUCGAGAUACUAAAGGAA | 1420 | gsusccucGfaGfAfUfacuaaaggaaL96 | 2516 | sense | 21 |
| UUCCUUUAGUAUCUCGAGGACAU | 1421 | usUfsccuUfuAfGfuaucUfcGfaggacsasu | 2517 | antisense | 23 |
| AAGAUGUCCUCGAGAUACUAA | 1422 | asasgaugUfcCfUfCfgagauacuaaL96 | 2518 | sense | 21 |
| UUAGUAUCUCGAGGACAUCUUGA | 1423 | usUfsaguAfuCfUfcgagGfaCfaucuusgsa | 2519 | antisense | 23 |
| CAAGAUGUCCUCGAGAUACUA | 1424 | csasagauGfuCfCfUfcgagauacuaL96 | 2520 | sense | 21 |
| UAGUAUCUCGAGGACAUCUUGAA | 1425 | usAfsguaUfcUfCfgaggAfcAfucuugsasa | 2521 | antisense | 23 |
| ACAACAUGCUAAAUCAGUACU | 1426 | ascsaacaUfgCfUfAfaaucaguacuL96 | 2522 | sense | 21 |
| AGUACUGAUUUAGCAUGUUGUUC | 1427 | asGfsuacUfgAfUfuuagCfaUfguugususc | 2523 | antisense | 23 |
| CAACAUGCUAAAUCAGUACUU | 1428 | csasacauGfcUfAfAfaucaguacuuL96 | 2524 | sense | 21 |
| AAGUACUGAUUUAGCAUGUUGUU | 1429 | asAfsguaCfuGfAfuuuaGfcAfuguugsusu | 2525 | antisense | 23 |
| AUGAACAACAUGCUAAAUCAG | 1430 | asusgaacAfaCfAfUfgcuaaaucagL96 | 2526 | sense | 21 |
| CUGAUUUAGCAUGUUGUUCAUAA | 1431 | csUfsgauUfuAfGfcaugUfuGfuucausasa | 2527 | antisense | 23 |
| UAUGAACAACAUGCUAAAUCA | 1432 | usasugaaCfaAfCfAfugcuaaaucaL96 | 2528 | sense | 21 |
| UGAUUUAGCAUGUUGUUCAUAAU | 1433 | usGfsauuUfaGfCfauguUfgUfucauasasu | 2529 | antisense | 23 |
| GCCAAGGCUGUGUUUGUGGGG | 1434 | gscscaagGfcUfGfUfguuuguggggL96 | 2530 | sense | 21 |
| CCCCACAAACACAGCCUUGGCGC | 1435 | csCfsccaCfaAfAfcacaGfcCfuuggcsgsc | 2531 | antisense | 23 |
| CCAAGGCUGUGUUUGUGGGGA | 1436 | cscsaaggCfuGfUfGfuuuguggggaL96 | 2532 | sense | 21 |
| UCCCCACAAACACAGCCUUGGCG | 1437 | usCfscccAfcAfAfacacAfgCfcuuggscsg | 2533 | antisense | 23 |
| UGGCGCCAAGGCUGUGUUUGU | 1438 | usgsgcgcCfaAfGfGfcuguguuuguL96 | 2534 | sense | 21 |
| ACAAACACAGCCUUGGCGCCAAG | 1439 | asCfsaaaCfaCfAfgccuUfgGfcgccasasg | 2535 | antisense | 23 |
| UUGGCGCCAAGGCUGUGUUUG | 1440 | ususggcgCfcAfAfGfgcuguguuugL96 | 2536 | sense | 21 |
| CAAACACAGCCUUGGCGCCAAGA | 1441 | csAfsaacAfcAfGfccuuGfgCfgccaasgsa | 2537 | antisense | 23 |
| UGAAAGCUCUGGCUCUUGGCG | 1442 | usgsaaagCfuCfUfGfgcucuuggcgL96 | 2538 | sense | 21 |
| CGCCAAGAGCCAGAGCUUUCAGA | 1443 | csGfsccaAfgAfGfccagAfgCfuuucasgsa | 2539 | antisense | 23 |
| GAAAGCUCUGGCUCUUGGCGC | 1444 | gsasaagcUfcUfGfGfcucuuggcgcL96 | 2540 | sense | 21 |
| GCGCCAAGAGCCAGAGCUUUCAG | 1445 | gsCfsgccAfaGfAfgccaGfaGfcuuucsasg | 2541 | antisense | 23 |
| GUUCUGAAAGCUCUGGCUCUU | 1446 | gsusucugAfaAfGfCfucuggcucuuL96 | 2542 | sense | 21 |
| AAGAGCCAGAGCUUUCAGAACAU | 1447 | asAfsgagCfcAfGfagcuUfuCfagaacsasu | 2543 | antisense | 23 |
| UGUUCUGAAAGCUCUGGCUCU | 1448 | usgsuucuGfaAfAfGfcucuggcucuL96 | 2544 | sense | 21 |
| AGAGCCAGAGCUUUCAGAACAUC | 1449 | asGfsagcCfaGfAfgcuuUfcAfgaacasusc | 2545 | antisense | 23 |
| CAGCCACUAUUGAUGUUCUGC | 1450 | csasgccaCfuAfUfUfgauguucugcL96 | 2546 | sense | 21 |
| GCAGAACAUCAAUAGUGGCUGGC | 1451 | gsCfsagaAfcAfUfcaauAfgUfggcugsgsc | 2547 | antisense | 23 |
| AGCCACUAUUGAUGUUCUGCC | 1452 | asgsccacUfaUfUfGfauguucugccL96 | 2548 | sense | 21 |
| GGCAGAACAUCAAUAGUGGCUGG | 1453 | gsGfscagAfaCfAfucaaUfaGfuggcusgsg | 2549 | antisense | 23 |
| GUGCCAGCCACUAUUGAUGUU | 1454 | gsusgccaGfcCfAfCfuauugauguuL96 | 2550 | sense | 21 |
| AACAUCAAUAGUGGCUGGCACCC | 1455 | asAfscauCfaAfUfagugGfcUfggcacscsc | 2551 | antisense | 23 |
| GGUGCCAGCCACUAUUGAUGU | 1456 | gsgsugccAfgCfCfAfcuauugauguL96 | 2552 | sense | 21 |
| ACAUCAAUAGUGGCUGGCACCCC | 1457 | asCfsaucAfaUfAfguggCfuGfgcaccscsc | 2553 | antisense | 23 |
| ACAAGGACCGAGAAGUCACCA | 1458 | ascsaaggAfcCfGfAfgaagucaccaL96 | 2554 | sense | 21 |
| UGGUGACUUCUCGGUCCUUGUAG | 1459 | usGfsgugAfcUfUfcucgGfuCfcuugusasg | 2555 | antisense | 23 |
| CAAGGACCGAGAAGUCACCAA | 1460 | csasaggaCfcGfAfGfaagucaccaaL96 | 2556 | sense | 21 |
| UUGGUGACUUCUCGGUCCUUGUA | 1461 | usUfsgguGfaCfUfucucGfgUfccuugsusa | 2557 | antisense | 23 |
| AUCUACAAGGACCGAGAAGUC | 1462 | asuscuacAfaGfGfAfccgagaagucL96 | 2558 | sense | 21 |
| GACUUCUCGGUCCUUGUAGAUAU | 1463 | gsAfscuuCfuCfGfguccUfuGfuagausasu | 2559 | antisense | 23 |
| UAUCUACAAGGACCGAGAAGU | 1464 | usasucuaCfaAfGfGfaccgagaaguL96 | 2560 | sense | 21 |
| ACUUCUCGGUCCUUGUAGAUAUA | 1465 | asCfsuucUfcGfGfuccuUfgUfagauasusa | 2561 | antisense | 23 |
| CAGAAUGUGAAAGUCAUCGAC | 1466 | csasgaauGfuGfAfAfagucaucgacL96 | 2562 | sense | 21 |
| GUCGAUGACUUUCACAUUCUGGC | 1467 | gsUfscgaUfgAfCfuuucAfcAfuucugsgsc | 2563 | antisense | 23 |
| AGAAUGUGAAAGUCAUCGACA | 1468 | asgsaaugUfgAfAfAfgucaucgacaL96 | 2564 | sense | 21 |
| UGUCGAUGACUUUCACAUUCUGG | 1469 | usGfsucgAfuGfAfcuuuCfaCfauucusgsg | 2565 | antisense | 23 |
| GUGCCAGAAUGUGAAAGUCAU | 1470 | gsusgccaGfaAfUfGfugaaagucauL96 | 2566 | sense | 21 |
| AUGACUUUCACAUUCUGGCACCC | 1471 | asUfsgacUfuUfCfacauUfcUfggcacscsc | 2567 | antisense | 23 |
| GGUGCCAGAAUGUGAAAGUCA | 1472 | gsgsugccAfgAfAfUfgugaaagucaL96 | 2568 | sense | 21 |
| UGACUUUCACAUUCUGGCACCCA | 1473 | usGfsacuUfuCfAfcauuCfuGfgcaccscsa | 2569 | antisense | 23 |
| AGAUGUCCUCGAGAUACUAAA | 1474 | asgsauguCfcUfCfGfagauacuaaaL96 | 2570 | sense | 21 |
| UUUAGUAUCUCGAGGACAUCUUG | 1475 | usUfsuagUfaUfCfucgaGfgAfcaucususg | 2571 | antisense | 23 |
| GAUGUCCUCGAGAUACUAAAG | 1476 | gsasugucCfuCfGfAfgauacuaaagL96 | 2572 | sense | 21 |
| CUUUAGUAUCUCGAGGACAUCUU | 1477 | csUfsuuaGfuAfUfcucgAfgGfacaucsusu | 2573 | antisense | 23 |
| UUCAAGAUGUCCUCGAGAUAC | 1478 | ususcaagAfuGfUfCfcucgagauacL96 | 2574 | sense | 21 |
| GUAUCUCGAGGACAUCUUGAACA | 1479 | gsUfsaucUfcGfAfggacAfuCfuugaascsa | 2575 | antisense | 23 |
| GUUCAAGAUGUCCUCGAGAUA | 1480 | gsusucaaGfaUfGfUfccucgagauaL96 | 2576 | sense | 21 |
| UAUCUCGAGGACAUCUUGAACAC | 1481 | usAfsucuCfgAfGfgacaUfcUfugaacsasc | 2577 | antisense | 23 |
| GUGGACUUGCUGCAUAUGUGG | 1482 | gsusggacUfuGfCfUfgcauauguggL96 | 2578 | sense | 21 |
| CCACAUAUGCAGCAAGUCCACUG | 1483 | csCfsacaUfaUfGfcagcAfaGfuccacsusg | 2579 | antisense | 23 |
| UGGACUUGCUGCAUAUGUGGC | 1484 | usgsgacuUfgCfUfGfcauauguggcL96 | 2580 | sense | 21 |
| GCCACAUAUGCAGCAAGUCCACU | 1485 | gsCfscacAfuAfUfgcagCfaAfguccascsu | 2581 | antisense | 23 |
| GACAGUGGACUUGCUGCAUAU | 1486 | gsascaguGfgAfCfUfugcugcauauL96 | 2582 | sense | 21 |
| AUAUGCAGCAAGUCCACUGUCGU | 1487 | asUfsaugCfaGfCfaaguCfcAfcugucsgsu | 2583 | antisense | 23 |
| CGACAGUGGACUUGCUGCAUA | 1488 | csgsacagUfgGfAfCfuugcugcauaL96 | 2584 | sense | 21 |
| UAUGCAGCAAGUCCACUGUCGUC | 1489 | usAfsugcAfgCfAfagucCfaCfugucgsusc | 2585 | antisense | 23 |
| AACCAGUACUUUAUCAUUUUC | 1490 | asasccagUfaCfUfUfuaucauuuucL96 | 2586 | sense | 21 |
| GAAAAUGAUAAAGUACUGGUUUC | 1491 | gsAfsaaaUfgAfUfaaagUfaCfugguususc | 2587 | antisense | 23 |
| ACCAGUACUUUAUCAUUUUCU | 1492 | ascscaguAfcUfUfUfaucauuuucuL96 | 2588 | sense | 21 |
| AGAAAAUGAUAAAGUACUGGUUU | 1493 | asGfsaaaAfuGfAfuaaaGfuAfcuggususu | 2589 | antisense | 23 |
| UUGAAACCAGUACUUUAUCAU | 1494 | ususgaaaCfcAfGfUfacuuuaucauL96 | 2590 | sense | 21 |
| AUGAUAAAGUACUGGUUUCAAAA | 1495 | asUfsgauAfaAfGfuacuGfgUfuucaasasa | 2591 | antisense | 23 |
| UUUGAAACCAGUACUUUAUCA | 1496 | ususugaaAfcCfAfGfuacuuuaucaL96 | 2592 | sense | 21 |
| UGAUAAAGUACUGGUUUCAAAAU | 1497 | usGfsauaAfaGfUfacugGfuUfucaaasasu | 2593 | antisense | 23 |
| CGAGAAGUCACCAAGAAGCUA | 1498 | csgsagaaGfuCfAfCfcaagaagcuaL96 | 2594 | sense | 21 |
| UAGCUUCUUGGUGACUUCUCGGU | 1499 | usAfsgcuUfcUfUfggugAfcUfucucgsgsu | 2595 | antisense | 23 |
| GAGAAGUCACCAAGAAGCUAG | 1500 | gsasgaagUfcAfCfCfaagaagcuagL96 | 2596 | sense | 21 |
| CUAGCUUCUUGGUGACUUCUCGG | 1501 | csUfsagcUfuCfUfugguGfaCfuucucsgsg | 2597 | antisense | 23 |
| GGACCGAGAAGUCACCAAGAA | 1502 | gsgsaccgAfgAfAfGfucaccaagaaL96 | 2598 | sense | 21 |
| UUCUUGGUGACUUCUCGGUCCUU | 1503 | usUfscuuGfgUfGfacuuCfuCfgguccsusu | 2599 | antisense | 23 |
| AGGACCGAGAAGUCACCAAGA | 1504 | asgsgaccGfaGfAfAfgucaccaagaL96 | 2600 | sense | 21 |
| UCUUGGUGACUUCUCGGUCCUUG | 1505 | usCfsuugGfuGfAfcuucUfcGfguccususg | 2601 | antisense | 23 |
| UCAAAGUGUUGGUAAUGCCUG | 1506 | uscsaaagUfgUfUfGfguaaugccugL96 | 2602 | sense | 21 |
| CAGGCAUUACCAACACUUUGAAC | 1507 | csAfsggcAfuUfAfccaaCfaCfuuugasasc | 2603 | antisense | 23 |
| CAAAGUGUUGGUAAUGCCUGA | 1508 | csasaaguGfuUfGfGfuaaugccugaL96 | 2604 | sense | 21 |
| UCAGGCAUUACCAACACUUUGAA | 1509 | usCfsaggCfaUfUfaccaAfcAfcuuugsasa | 2605 | antisense | 23 |
| AGGUUCAAAGUGUUGGUAAUG | 1510 | asgsguucAfaAfGfUfguugguaaugL96 | 2606 | sense | 21 |
| CAUUACCAACACUUUGAACCUGA | 1511 | csAfsuuaCfcAfAfcacuUfuGfaaccusgsa | 2607 | antisense | 23 |
| CAGGUUCAAAGUGUUGGUAAU | 1512 | csasgguuCfaAfAfGfuguugguaauL96 | 2608 | sense | 21 |
| AUUACCAACACUUUGAACCUGAG | 1513 | asUfsuacCfaAfCfacuuUfgAfaccugsasg | 2609 | antisense | 23 |
| UAUUACUUGACAAAGAGACAC | 1514 | usasuuacUfuGfAfCfaaagagacacL96 | 2610 | sense | 21 |
| GUGUCUCUUUGUCAAGUAAUACA | 1515 | gsUfsgucUfcUfUfugucAfaGfuaauascsa | 2611 | antisense | 23 |
| AUUACUUGACAAAGAGACACU | 1516 | asusuacuUfgAfCfAfaagagacacuL96 | 2612 | sense | 21 |
| AGUGUCUCUUUGUCAAGUAAUAC | 1517 | asGfsuguCfuCfUfuuguCfaAfguaausasc | 2613 | antisense | 23 |
| CAUGUAUUACUUGACAAAGAG | 1518 | csasuguaUfuAfCfUfugacaaagagL96 | 2614 | sense | 21 |
| CUCUUUGUCAAGUAAUACAUGCU | 1519 | csUfscuuUfgUfCfaaguAfaUfacaugscsu | 2615 | antisense | 23 |
| GCAUGUAUUACUUGACAAAGA | 1520 | gscsauguAfuUfAfCfuugacaaagaL96 | 2616 | sense | 21 |
| UCUUUGUCAAGUAAUACAUGCUG | 1521 | usCfsuuuGfuCfAfaguaAfuAfcaugcsusg | 2617 | antisense | 23 |
| AAAGUCAUCGACAAGACAUUG | 1522 | asasagucAfuCfGfAfcaagacauugL96 | 2618 | sense | 21 |
| CAAUGUCUUGUCGAUGACUUUCA | 1523 | csAfsaugUfcUfUfgucgAfuGfacuuuscsa | 2619 | antisense | 23 |
| AAGUCAUCGACAAGACAUUGG | 1524 | asasgucaUfcGfAfCfaagacauuggL96 | 2620 | sense | 21 |
| CCAAUGUCUUGUCGAUGACUUUC | 1525 | csCfsaauGfuCfUfugucGfaUfgacuususc | 2621 | antisense | 23 |
| UGUGAAAGUCAUCGACAAGAC | 1526 | usgsugaaAfgUfCfAfucgacaagacL96 | 2622 | sense | 21 |
| GUCUUGUCGAUGACUUUCACAUU | 1527 | gsUfscuuGfuCfGfaugaCfuUfucacasusu | 2623 | antisense | 23 |
| AUGUGAAAGUCAUCGACAAGA | 1528 | asusgugaAfaGfUfCfaucgacaagaL96 | 2624 | sense | 21 |
| UCUUGUCGAUGACUUUCACAUUC | 1529 | usCfsuugUfcGfAfugacUfuUfcacaususc | 2625 | antisense | 23 |
| AUAUGUGGCUAAAGCAAUAGA | 1530 | asusauguGfgCfUfAfaagcaauagaL96 | 2626 | sense | 21 |
| UCUAUUGCUUUAGCCACAUAUGC | 1531 | usCfsuauUfgCfUfuuagCfcAfcauausgsc | 2627 | antisense | 23 |
| UAUGUGGCUAAAGCAAUAGAC | 1532 | usasugugGfcUfAfAfagcaauagacL96 | 2628 | sense | 21 |
| GUCUAUUGCUUUAGCCACAUAUG | 1533 | gsUfscuaUfuGfCfuuuaGfcCfacauasusg | 2629 | antisense | 23 |
| CUGCAUAUGUGGCUAAAGCAA | 1534 | csusgcauAfuGfUfGfgcuaaagcaaL96 | 2630 | sense | 21 |
| UUGCUUUAGCCACAUAUGCAGCA | 1535 | usUfsgcuUfuAfGfccacAfuAfugcagscsa | 2631 | antisense | 23 |
| GCUGCAUAUGUGGCUAAAGCA | 1536 | gscsugcaUfaUfGfUfggcuaaagcaL96 | 2632 | sense | 21 |
| UGCUUUAGCCACAUAUGCAGCAA | 1537 | usGfscuuUfaGfCfcacaUfaUfgcagcsasa | 2633 | antisense | 23 |
| AGACGACAGUGGACUUGCUGC | 1538 | asgsacgaCfaGfUfGfgacuugcugcL96 | 2634 | sense | 21 |
| GCAGCAAGUCCACUGUCGUCUCC | 1539 | gsCfsagcAfaGfUfccacUfgUfcgucuscsc | 2635 | antisense | 23 |
| GACGACAGUGGACUUGCUGCA | 1540 | gsascgacAfgUfGfGfacuugcugcaL96 | 2636 | sense | 21 |
| UGCAGCAAGUCCACUGUCGUCUC | 1541 | usGfscagCfaAfGfuccaCfuGfucgucsusc | 2637 | antisense | 23 |
| UUGGAGACGACAGUGGACUUG | 1542 | ususggagAfcGfAfCfaguggacuugL96 | 2638 | sense | 21 |
| CAAGUCCACUGUCGUCUCCAAAA | 1543 | csAfsaguCfcAfCfugucGfuCfuccaasasa | 2639 | antisense | 23 |
| UUUGGAGACGACAGUGGACUU | 1544 | ususuggaGfaCfGfAfcaguggacuuL96 | 2640 | sense | 21 |
| AAGUCCACUGUCGUCUCCAAAAU | 1545 | asAfsgucCfaCfUfgucgUfcUfccaaasasu | 2641 | antisense | 23 |
| GGCCACCUCCUCAAUUGAAGA | 1546 | gsgsccacCfuCfCfUfcaauugaagaL96 | 2642 | sense | 21 |
| UCUUCAAUUGAGGAGGUGGCCCA | 1547 | usCfsuucAfaUfUfgaggAfgGfuggccscsa | 2643 | antisense | 23 |
| GCCACCUCCUCAAUUGAAGAA | 1548 | gscscaccUfcCfUfCfaauugaagaaL96 | 2644 | sense | 21 |
| UUCUUCAAUUGAGGAGGUGGCCC | 1549 | usUfscuuCfaAfUfugagGfaGfguggcscsc | 2645 | antisense | 23 |
| CCUGGGCCACCUCCUCAAUUG | 1550 | cscsugggCfcAfCfCfuccucaauugL96 | 2646 | sense | 21 |
| CAAUUGAGGAGGUGGCCCAGGAA | 1551 | csAfsauuGfaGfGfagguGfgCfccaggsasa | 2647 | antisense | 23 |
| UCCUGGGCCACCUCCUCAAUU | 1552 | uscscuggGfcCfAfCfcuccucaauuL96 | 2648 | sense | 21 |
| AAUUGAGGAGGUGGCCCAGGAAC | 1553 | asAfsuugAfgGfAfggugGfcCfcaggasasc | 2649 | antisense | 23 |
| UGUAUGUUACUUCUUAGAGAG | 1554 | usgsuaugUfuAfCfUfucuuagagagL96 | 2650 | sense | 21 |
| CUCUCUAAGAAGUAACAUACAUC | 1555 | csUfscucUfaAfGfaaguAfaCfauacasusc | 2651 | antisense | 23 |
| GUAUGUUACUUCUUAGAGAGA | 1556 | gsusauguUfaCfUfUfcuuagagagaL96 | 2652 | sense | 21 |
| UCUCUCUAAGAAGUAACAUACAU | 1557 | usCfsucuCfuAfAfgaagUfaAfcauacsasu | 2653 | antisense | 23 |
| AGGAUGUAUGUUACUUCUUAG | 1558 | asgsgaugUfaUfGfUfuacuucuuagL96 | 2654 | sense | 21 |
| CUAAGAAGUAACAUACAUCCUAA | 1559 | csUfsaagAfaGfUfaacaUfaCfauccusasa | 2655 | antisense | 23 |
| UAGGAUGUAUGUUACUUCUUA | 1560 | usasggauGfuAfUfGfuuacuucuuaL96 | 2656 | sense | 21 |
| UAAGAAGUAACAUACAUCCUAAA | 1561 | usAfsagaAfgUfAfacauAfcAfuccuasasa | 2657 | antisense | 23 |
| AAAUGUUUUAGGAUGUAUGUU | 1562 | asasauguUfuUfAfGfgauguauguuL96 | 2658 | sense | 21 |
| AACAUACAUCCUAAAACAUUUGG | 1563 | asAfscauAfcAfUfccuaAfaAfcauuusgsg | 2659 | antisense | 23 |
| AAUGUUUUAGGAUGUAUGUUA | 1564 | asasuguuUfuAfGfGfauguauguuaL96 | 2660 | sense | 21 |
| UAACAUACAUCCUAAAACAUUUG | 1565 | usAfsacaUfaCfAfuccuAfaAfacauususg | 2661 | antisense | 23 |
| AUCCAAAUGUUUUAGGAUGUA | 1566 | asusccaaAfuGfUfUfuuaggauguaL96 | 2662 | sense | 21 |
| UACAUCCUAAAACAUUUGGAUAU | 1567 | usAfscauCfcUfAfaaacAfuUfuggausasu | 2663 | antisense | 23 |
| UAUCCAAAUGUUUUAGGAUGU | 1568 | usasuccaAfaUfGfUfuuuaggauguL96 | 2664 | sense | 21 |
| ACAUCCUAAAACAUUUGGAUAUA | 1569 | asCfsaucCfuAfAfaacaUfuUfggauasusa | 2665 | antisense | 23 |
| AUGGGUGGCGGUAAUUGGUGA | 1570 | asusggguGfgCfGfGfuaauuggugaL96 | 2666 | sense | 21 |
| UCACCAAUUACCGCCACCCAUUC | 1571 | usCfsaccAfaUfUfaccgCfcAfcccaususc | 2667 | antisense | 23 |
| UGGGUGGCGGUAAUUGGUGAU | 1572 | usgsggugGfcGfGfUfaauuggugauL96 | 2668 | sense | 21 |
| AUCACCAAUUACCGCCACCCAUU | 1573 | asUfscacCfaAfUfuaccGfcCfacccasusu | 2669 | antisense | 23 |
| UGGAAUGGGUGGCGGUAAUUG | 1574 | usgsgaauGfgGfUfGfgcgguaauugL96 | 2670 | sense | 21 |
| CAAUUACCGCCACCCAUUCCAAU | 1575 | csAfsauuAfcCfGfccacCfcAfuuccasasu | 2671 | antisense | 23 |
| UUGGAAUGGGUGGCGGUAAUU | 1576 | ususggaaUfgGfGfUfggcgguaauuL96 | 2672 | sense | 21 |
| AAUUACCGCCACCCAUUCCAAUU | 1577 | asAfsuuaCfcGfCfcaccCfaUfuccaasusu | 2673 | antisense | 23 |
| UUCAAAGUGUUGGUAAUGCCU | 1578 | ususcaaaGfuGfUfUfgguaaugccuL96 | 2674 | sense | 21 |
| AGGCAUUACCAACACUUUGAACC | 1579 | asGfsgcaUfuAfCfcaacAfcUfuugaascsc | 2675 | antisense | 23 |
| UCAAAGUGUUGGUAAUGCCUG | 1580 | uscsaaagUfgUfUfGfguaaugccugL96 | 2676 | sense | 21 |
| CAGGCAUUACCAACACUUUGAAC | 1581 | csAfsggcAfuUfAfccaaCfaCfuuugasasc | 2677 | antisense | 23 |
| CAGGUUCAAAGUGUUGGUAAU | 1582 | csasgguuCfaAfAfGfuguugguaauL96 | 2678 | sense | 21 |
| AUUACCAACACUUUGAACCUGAG | 1583 | asUfsuacCfaAfCfacuuUfgAfaccugsasg | 2679 | antisense | 23 |
| UCAGGUUCAAAGUGUUGGUAA | 1584 | uscsagguUfcAfAfAfguguugguaaL96 | 2680 | sense | 21 |
| UUACCAACACUUUGAACCUGAGC | 1585 | usUfsaccAfaCfAfcuuuGfaAfccugasgsc | 2681 | antisense | 23 |
| CCACCUCCUCAAUUGAAGAAG | 1586 | cscsaccuCfcUfCfAfauugaagaagL96 | 2682 | sense | 21 |
| CUUCUUCAAUUGAGGAGGUGGCC | 1587 | csUfsucuUfcAfAfuugaGfgAfgguggscsc | 2683 | antisense | 23 |
| CACCUCCUCAAUUGAAGAAGU | 1588 | csasccucCfuCfAfAfuugaagaaguL96 | 2684 | sense | 21 |
| ACUUCUUCAAUUGAGGAGGUGGC | 1589 | asCfsuucUfuCfAfauugAfgGfaggugsgsc | 2685 | antisense | 23 |
| UGGGCCACCUCCUCAAUUGAA | 1590 | usgsggccAfcCfUfCfcucaauugaaL96 | 2686 | sense | 21 |
| UUCAAUUGAGGAGGUGGCCCAGG | 1591 | usUfscaaUfuGfAfggagGfuGfgcccasgsg | 2687 | antisense | 23 |
| CUGGGCCACCUCCUCAAUUGA | 1592 | csusgggcCfaCfCfUfccucaauugaL96 | 2688 | sense | 21 |
| UCAAUUGAGGAGGUGGCCCAGGA | 1593 | usCfsaauUfgAfGfgaggUfgGfcccagsgsa | 2689 | antisense | 23 |
| GAGUGGGUGCCAGAAUGUGAA | 1594 | gsasguggGfuGfCfCfagaaugugaaL96 | 2690 | sense | 21 |
| UUCACAUUCUGGCACCCACUCAG | 1595 | usUfscacAfuUfCfuggcAfcCfcacucsasg | 2691 | antisense | 23 |
| AGUGGGUGCCAGAAUGUGAAA | 1596 | asgsugggUfgCfCfAfgaaugugaaaL96 | 2692 | sense | 21 |
| UUUCACAUUCUGGCACCCACUCA | 1597 | usUfsucaCfaUfUfcuggCfaCfccacuscsa | 2693 | antisense | 23 |
| CUCUGAGUGGGUGCCAGAAUG | 1598 | csuscugaGfuGfGfGfugccagaaugL96 | 2694 | sense | 21 |
| CAUUCUGGCACCCACUCAGAGCC | 1599 | csAfsuucUfgGfCfacccAfcUfcagagscsc | 2695 | antisense | 23 |
| GCUCUGAGUGGGUGCCAGAAU | 1600 | gscsucugAfgUfGfGfgugccagaauL96 | 2696 | sense | 21 |
| AUUCUGGCACCCACUCAGAGCCA | 1601 | asUfsucuGfgCfAfcccaCfuCfagagcscsa | 2697 | antisense | 23 |
| GCACUGAUGUUCUGAAAGCUC | 1602 | gscsacugAfuGfUfUfcugaaagcucL96 | 2698 | sense | 21 |
| GAGCUUUCAGAACAUCAGUGCCU | 1603 | gsAfsgcuUfuCfAfgaacAfuCfagugcscsu | 2699 | antisense | 23 |
| CACUGAUGUUCUGAAAGCUCU | 1604 | csascugaUfgUfUfCfugaaagcucuL96 | 2700 | sense | 21 |
| AGAGCUUUCAGAACAUCAGUGCC | 1605 | asGfsagcUfuUfCfagaaCfaUfcagugscsc | 2701 | antisense | 23 |
| AAAGGCACUGAUGUUCUGAAA | 1606 | asasaggcAfcUfGfAfuguucugaaaL96 | 2702 | sense | 21 |
| UUUCAGAACAUCAGUGCCUUUCC | 1607 | usUfsucaGfaAfCfaucaGfuGfccuuuscsc | 2703 | antisense | 23 |
| GAAAGGCACUGAUGUUCUGAA | 1608 | gsasaaggCfaCfUfGfauguucugaaL96 | 2704 | sense | 21 |
| UUCAGAACAUCAGUGCCUUUCCG | 1609 | usUfscagAfaCfAfucagUfgCfcuuucscsg | 2705 | antisense | 23 |
| GGGAAGGUGGAAGUCUUCCUG | 1610 | gsgsgaagGfuGfGfAfagucuuccugL96 | 2706 | sense | 21 |
| CAGGAAGACUUCCACCUUCCCUU | 1611 | csAfsggaAfgAfCfuuccAfcCfuucccsusu | 2707 | antisense | 23 |
| GGAAGGUGGAAGUCUUCCUGG | 1612 | gsgsaaggUfgGfAfAfgucuuccuggL96 | 2708 | sense | 21 |
| CCAGGAAGACUUCCACCUUCCCU | 1613 | csCfsaggAfaGfAfcuucCfaCfcuuccscsu | 2709 | antisense | 23 |
| GGAAGGGAAGGUGGAAGUCUU | 1614 | gsgsaaggGfaAfGfGfuggaagucuuL96 | 2710 | sense | 21 |
| AAGACUUCCACCUUCCCUUCCAC | 1615 | asAfsgacUfuCfCfaccuUfcCfcuuccsasc | 2711 | antisense | 23 |
| UGGAAGGGAAGGUGGAAGUCU | 1616 | usgsgaagGfgAfAfGfguggaagucuL96 | 2712 | sense | 21 |
| AGACUUCCACCUUCCCUUCCACA | 1617 | asGfsacuUfcCfAfccuuCfcCfuuccascsa | 2713 | antisense | 23 |
| UGCUAAAUCAGUACUUCCAAA | 1618 | usgscuaaAfuCfAfGfuacuuccaaaL96 | 2714 | sense | 21 |
| UUUGGAAGUACUGAUUUAGCAUG | 1619 | usUfsuggAfaGfUfacugAfuUfuagcasusg | 2715 | antisense | 23 |
| GCUAAAUCAGUACUUCCAAAG | 1620 | gscsuaaaUfcAfGfUfacuuccaaagL96 | 2716 | sense | 21 |
| CUUUGGAAGUACUGAUUUAGCAU | 1621 | csUfsuugGfaAfGfuacuGfaUfuuagcsasu | 2717 | antisense | 23 |
| AACAUGCUAAAUCAGUACUUC | 1622 | asascaugCfuAfAfAfucaguacuucL96 | 2718 | sense | 21 |
| GAAGUACUGAUUUAGCAUGUUGU | 1623 | gsAfsaguAfcUfGfauuuAfgCfauguusgsu | 2719 | antisense | 23 |
| CAACAUGCUAAAUCAGUACUU | 1624 | csasacauGfcUfAfAfaucaguacuuL96 | 2720 | sense | 21 |
| AAGUACUGAUUUAGCAUGUUGUU | 1625 | asAfsguaCfuGfAfuuuaGfcAfuguugsusu | 2721 | antisense | 23 |
| CCACAACUCAGGAUGAAAAAU | 1626 | cscsacaaCfuCfAfGfgaugaaaaauL96 | 2722 | sense | 21 |
| AUUUUUCAUCCUGAGUUGUGGCG | 1627 | asUfsuuuUfcAfUfccugAfgUfuguggscsg | 2723 | antisense | 23 |
| CACAACUCAGGAUGAAAAAUU | 1628 | csascaacUfcAfGfGfaugaaaaauuL96 | 2724 | sense | 21 |
| AAUUUUUCAUCCUGAGUUGUGGC | 1629 | asAfsuuuUfuCfAfuccuGfaGfuugugsgsc | 2725 | antisense | 23 |
| GCCGCCACAACUCAGGAUGAA | 1630 | gscscgccAfcAfAfCfucaggaugaaL96 | 2726 | sense | 21 |
| UUCAUCCUGAGUUGUGGCGGCAG | 1631 | usUfscauCfcUfGfaguuGfuGfgcggcsasg | 2727 | antisense | 23 |
| UGCCGCCACAACUCAGGAUGA | 1632 | usgsccgcCfaCfAfAfcucaggaugaL96 | 2728 | sense | 21 |
| UCAUCCUGAGUUGUGGCGGCAGU | 1633 | usCfsaucCfuGfAfguugUfgGfcggcasgsu | 2729 | antisense | 23 |
| GCAACCGUCUGGAUGAUGUGC | 1634 | gscsaaccGfuCfUfGfgaugaugugcL96 | 2730 | sense | 21 |
| GCACAUCAUCCAGACGGUUGCCC | 1635 | gsCfsacaUfcAfUfccagAfcGfguugcscsc | 2731 | antisense | 23 |
| CAACCGUCUGGAUGAUGUGCG | 1636 | csasaccgUfcUfGfGfaugaugugcgL96 | 2732 | sense | 21 |
| CGCACAUCAUCCAGACGGUUGCC | 1637 | csGfscacAfuCfAfuccaGfaCfgguugscsc | 2733 | antisense | 23 |
| CUGGGCAACCGUCUGGAUGAU | 1638 | csusgggcAfaCfCfGfucuggaugauL96 | 2734 | sense | 21 |
| AUCAUCCAGACGGUUGCCCAGGU | 1639 | asUfscauCfcAfGfacggUfuGfcccagsgsu | 2735 | antisense | 23 |
| CCUGGGCAACCGUCUGGAUGA | 1640 | cscsugggCfaAfCfCfgucuggaugaL96 | 2736 | sense | 21 |
| UCAUCCAGACGGUUGCCCAGGUA | 1641 | usCfsaucCfaGfAfcgguUfgCfccaggsusa | 2737 | antisense | 23 |
| GCAAAUGAUGAAGAAACUUUG | 1642 | gscsaaauGfaUfGfAfagaaacuuugL96 | 2738 | sense | 21 |
| CAAAGUUUCUUCAUCAUUUGCCC | 1643 | csAfsaagUfuUfCfuucaUfcAfuuugcscsc | 2739 | antisense | 23 |
| CAAAUGAUGAAGAAACUUUGG | 1644 | csasaaugAfuGfAfAfgaaacuuuggL96 | 2740 | sense | 21 |
| CCAAAGUUUCUUCAUCAUUUGCC | 1645 | csCfsaaaGfuUfUfcuucAfuCfauuugscsc | 2741 | antisense | 23 |
| UGGGGCAAAUGAUGAAGAAAC | 1646 | usgsgggcAfaAfUfGfaugaagaaacL96 | 2742 | sense | 21 |
| GUUUCUUCAUCAUUUGCCCCAGA | 1647 | gsUfsuucUfuCfAfucauUfuGfccccasgsa | 2743 | antisense | 23 |
| CUGGGGCAAAUGAUGAAGAAA | 1648 | csusggggCfaAfAfUfgaugaagaaaL96 | 2744 | sense | 21 |
| UUUCUUCAUCAUUUGCCCCAGAC | 1649 | usUfsucuUfcAfUfcauuUfgCfcccagsasc | 2745 | antisense | 23 |
| CCAAGGCUGUGUUUGUGGGGA | 1650 | cscsaaggCfuGfUfGfuuuguggggaL96 | 2746 | sense | 21 |
| UCCCCACAAACACAGCCUUGGCG | 1651 | usCfscccAfcAfAfacacAfgCfcuuggscsg | 2747 | antisense | 23 |
| CAAGGCUGUGUUUGUGGGGAG | 1652 | csasaggcUfgUfGfUfuuguggggagL96 | 2748 | sense | 21 |
| CUCCCCACAAACACAGCCUUGGC | 1653 | csUfscccCfaCfAfaacaCfaGfccuugsgsc | 2749 | antisense | 23 |
| GGCGCCAAGGCUGUGUUUGUG | 1654 | gsgscgccAfaGfGfCfuguguuugugL96 | 2750 | sense | 21 |
| CACAAACACAGCCUUGGCGCCAA | 1655 | csAfscaaAfcAfCfagccUfuGfgcgccsasa | 2751 | antisense | 23 |
| UGGCGCCAAGGCUGUGUUUGU | 1656 | usgsgcgcCfaAfGfGfcuguguuuguL96 | 2752 | sense | 21 |
| ACAAACACAGCCUUGGCGCCAAG | 1657 | asCfsaaaCfaCfAfgccuUfgGfcgccasasg | 2753 | antisense | 23 |
| ACUGCCGCCACAACUCAGGAU | 1658 | ascsugccGfcCfAfCfaacucaggauL96 | 2754 | sense | 21 |
| AUCCUGAGUUGUGGCGGCAGUUU | 1659 | asUfsccuGfaGfUfugugGfcGfgcagususu | 2755 | antisense | 23 |
| CUGCCGCCACAACUCAGGAUG | 1660 | csusgccgCfcAfCfAfacucaggaugL96 | 2756 | sense | 21 |
| CAUCCUGAGUUGUGGCGGCAGUU | 1661 | csAfsuccUfgAfGfuuguGfgCfggcagsusu | 2757 | antisense | 23 |
| UCAAACUGCCGCCACAACUCA | 1662 | uscsaaacUfgCfCfGfccacaacucaL96 | 2758 | sense | 21 |
| UGAGUUGUGGCGGCAGUUUGAAU | 1663 | usGfsaguUfgUfGfgcggCfaGfuuugasasu | 2759 | antisense | 23 |
| UUCAAACUGCCGCCACAACUC | 1664 | ususcaaaCfuGfCfCfgccacaacucL96 | 2760 | sense | 21 |
| GAGUUGUGGCGGCAGUUUGAAUC | 1665 | gsAfsguuGfuGfGfcggcAfgUfuugaasusc | 2761 | antisense | 23 |
| GGGAAGAUAUCAAAUGGCUGA | 1666 | gsgsgaagAfuAfUfCfaaauggcugaL96 | 2762 | sense | 21 |
| UCAGCCAUUUGAUAUCUUCCCAG | 1667 | usCfsagcCfaUfUfugauAfuCfuucccsasg | 2763 | antisense | 23 |
| GGAAGAUAUCAAAUGGCUGAG | 1668 | gsgsaagaUfaUfCfAfaauggcugagL96 | 2764 | sense | 21 |
| CUCAGCCAUUUGAUAUCUUCCCA | 1669 | csUfscagCfcAfUfuugaUfaUfcuuccscsa | 2765 | antisense | 23 |
| AGCUGGGAAGAUAUCAAAUGG | 1670 | asgscuggGfaAfGfAfuaucaaauggL96 | 2766 | sense | 21 |
| CCAUUUGAUAUCUUCCCAGCUGA | 1671 | csCfsauuUfgAfUfaucuUfcCfcagcusgsa | 2767 | antisense | 23 |
| CAGCUGGGAAGAUAUCAAAUG | 1672 | csasgcugGfgAfAfGfauaucaaaugL96 | 2768 | sense | 21 |
| CAUUUGAUAUCUUCCCAGCUGAU | 1673 | csAfsuuuGfaUfAfucuuCfcCfagcugsasu | 2769 | antisense | 23 |
| AAUCAGUACUUCCAAAGUCUA | 1674 | asasucagUfaCfUfUfccaaagucuaL96 | 2770 | sense | 21 |
| UAGACUUUGGAAGUACUGAUUUA | 1675 | usAfsgacUfuUfGfgaagUfaCfugauususa | 2771 | antisense | 23 |
| AUCAGUACUUCCAAAGUCUAU | 1676 | asuscaguAfcUfUfCfcaaagucuauL96 | 2772 | sense | 21 |
| AUAGACUUUGGAAGUACUGAUUU | 1677 | asUfsagaCfuUfUfggaaGfuAfcugaususu | 2773 | antisense | 23 |
| GCUAAAUCAGUACUUCCAAAG | 1678 | gscsuaaaUfcAfGfUfacuuccaaagL96 | 2774 | sense | 21 |
| CUUUGGAAGUACUGAUUUAGCAU | 1679 | csUfsuugGfaAfGfuacuGfaUfuuagcsasu | 2775 | antisense | 23 |
| UGCUAAAUCAGUACUUCCAAA | 1680 | usgscuaaAfuCfAfGfuacuuccaaaL96 | 2776 | sense | 21 |
| UUUGGAAGUACUGAUUUAGCAUG | 1681 | usUfsuggAfaGfUfacugAfuUfuagcasusg | 2777 | antisense | 23 |
| UCAGCAUGCCAAUAUGUGUGG | 1682 | uscsagcaUfgCfCfAfauauguguggL96 | 2778 | sense | 21 |
| CCACACAUAUUGGCAUGCUGACC | 1683 | csCfsacaCfaUfAfuuggCfaUfgcugascsc | 2779 | antisense | 23 |
| CAGCAUGCCAAUAUGUGUGGG | 1684 | csasgcauGfcCfAfAfuaugugugggL96 | 2780 | sense | 21 |
| CCCACACAUAUUGGCAUGCUGAC | 1685 | csCfscacAfcAfUfauugGfcAfugcugsasc | 2781 | antisense | 23 |
| AGGGUCAGCAUGCCAAUAUGU | 1686 | asgsggucAfgCfAfUfgccaauauguL96 | 2782 | sense | 21 |
| ACAUAUUGGCAUGCUGACCCUCU | 1687 | asCfsauaUfuGfGfcaugCfuGfacccuscsu | 2783 | antisense | 23 |
| GAGGGUCAGCAUGCCAAUAUG | 1688 | gsasggguCfaGfCfAfugccaauaugL96 | 2784 | sense | 21 |
| CAUAUUGGCAUGCUGACCCUCUG | 1689 | csAfsuauUfgGfCfaugcUfgAfcccucsusg | 2785 | antisense | 23 |
| GCAUAUGUGGCUAAAGCAAUA | 1690 | gscsauauGfuGfGfCfuaaagcaauaL96 | 2786 | sense | 21 |
| UAUUGCUUUAGCCACAUAUGCAG | 1691 | usAfsuugCfuUfUfagccAfcAfuaugcsasg | 2787 | antisense | 23 |
| CAUAUGUGGCUAAAGCAAUAG | 1692 | csasuaugUfgGfCfUfaaagcaauagL96 | 2788 | sense | 21 |
| CUAUUGCUUUAGCCACAUAUGCA | 1693 | csUfsauuGfcUfUfuagcCfaCfauaugscsa | 2789 | antisense | 23 |
| UGCUGCAUAUGUGGCUAAAGC | 1694 | usgscugcAfuAfUfGfuggcuaaagcL96 | 2790 | sense | 21 |
| GCUUUAGCCACAUAUGCAGCAAG | 1695 | gsCfsuuuAfgCfCfacauAfuGfcagcasasg | 2791 | antisense | 23 |
| UUGCUGCAUAUGUGGCUAAAG | 1696 | ususgcugCfaUfAfUfguggcuaaagL96 | 2792 | sense | 21 |
| CUUUAGCCACAUAUGCAGCAAGU | 1697 | csUfsuuaGfcCfAfcauaUfgCfagcaasgsu | 2793 | antisense | 23 |
| AAAUGAUGAAGAAACUUUGGC | 1698 | asasaugaUfgAfAfGfaaacuuuggcL96 | 2794 | sense | 21 |
| GCCAAAGUUUCUUCAUCAUUUGC | 1699 | gsCfscaaAfgUfUfucuuCfaUfcauuusgsc | 2795 | antisense | 23 |
| AAUGAUGAAGAAACUUUGGCU | 1700 | asasugauGfaAfGfAfaacuuuggcuL96 | 2796 | sense | 21 |
| AGCCAAAGUUUCUUCAUCAUUUG | 1701 | asGfsccaAfaGfUfuucuUfcAfucauususg | 2797 | antisense | 23 |
| GGGCAAAUGAUGAAGAAACUU | 1702 | gsgsgcaaAfuGfAfUfgaagaaacuuL96 | 2798 | sense | 21 |
| AAGUUUCUUCAUCAUUUGCCCCA | 1703 | asAfsguuUfcUfUfcaucAfuUfugcccscsa | 2799 | antisense | 23 |
| GGGGCAAAUGAUGAAGAAACU | 1704 | gsgsggcaAfaUfGfAfugaagaaacuL96 | 2800 | sense | 21 |
| AGUUUCUUCAUCAUUUGCCCCAG | 1705 | asGfsuuuCfuUfCfaucaUfuUfgccccsasg | 2801 | antisense | 23 |
| GAGAUACUAAAGGAAGAAUUC | 1706 | gsasgauaCfuAfAfAfggaagaauucL96 | 2802 | sense | 21 |
| GAAUUCUUCCUUUAGUAUCUCGA | 1707 | gsAfsauuCfuUfCfcuuuAfgUfaucucsgsa | 2803 | antisense | 23 |
| AGAUACUAAAGGAAGAAUUCC | 1708 | asgsauacUfaAfAfGfgaagaauuccL96 | 2804 | sense | 21 |
| GGAAUUCUUCCUUUAGUAUCUCG | 1709 | gsGfsaauUfcUfUfccuuUfaGfuaucuscsg | 2805 | antisense | 23 |
| CCUCGAGAUACUAAAGGAAGA | 1710 | cscsucgaGfaUfAfCfuaaaggaagaL96 | 2806 | sense | 21 |
| UCUUCCUUUAGUAUCUCGAGGAC | 1711 | usCfsuucCfuUfUfaguaUfcUfcgaggsasc | 2807 | antisense | 23 |
| UCCUCGAGAUACUAAAGGAAG | 1712 | uscscucgAfgAfUfAfcuaaaggaagL96 | 2808 | sense | 21 |
| CUUCCUUUAGUAUCUCGAGGACA | 1713 | csUfsuccUfuUfAfguauCfuCfgaggascsa | 2809 | antisense | 23 |
| ACAACUCAGGAUGAAAAAUUU | 1714 | ascsaacuCfaGfGfAfugaaaaauuuL96 | 2810 | sense | 21 |
| AAAUUUUUCAUCCUGAGUUGUGG | 1715 | asAfsauuUfuUfCfauccUfgAfguugusgsg | 2811 | antisense | 23 |
| CAACUCAGGAUGAAAAAUUUU | 1716 | csasacucAfgGfAfUfgaaaaauuuuL96 | 2812 | sense | 21 |
| AAAAUUUUUCAUCCUGAGUUGUG | 1717 | asAfsaauUfuUfUfcaucCfuGfaguugsusg | 2813 | antisense | 23 |
| CGCCACAACUCAGGAUGAAAA | 1718 | csgsccacAfaCfUfCfaggaugaaaaL96 | 2814 | sense | 21 |
| UUUUCAUCCUGAGUUGUGGCGGC | 1719 | usUfsuucAfuCfCfugagUfuGfuggcgsgsc | 2815 | antisense | 23 |
| CCGCCACAACUCAGGAUGAAA | 1720 | cscsgccaCfaAfCfUfcaggaugaaaL96 | 2816 | sense | 21 |
| UUUCAUCCUGAGUUGUGGCGGCA | 1721 | usUfsucaUfcCfUfgaguUfgUfggcggscsa | 2817 | antisense | 23 |
| AGGGAAGGUGGAAGUCUUCCU | 1722 | asgsggaaGfgUfGfGfaagucuuccuL96 | 2818 | sense | 21 |
| AGGAAGACUUCCACCUUCCCUUC | 1723 | asGfsgaaGfaCfUfuccaCfcUfucccususc | 2819 | antisense | 23 |
| GGGAAGGUGGAAGUCUUCCUG | 1724 | gsgsgaagGfuGfGfAfagucuuccugL96 | 2820 | sense | 21 |
| CAGGAAGACUUCCACCUUCCCUU | 1725 | csAfsggaAfgAfCfuuccAfcCfuucccsusu | 2821 | antisense | 23 |
| UGGAAGGGAAGGUGGAAGUCU | 1726 | usgsgaagGfgAfAfGfguggaagucuL96 | 2822 | sense | 21 |
| AGACUUCCACCUUCCCUUCCACA | 1727 | asGfsacuUfcCfAfccuuCfcCfuuccascsa | 2823 | antisense | 23 |
| GUGGAAGGGAAGGUGGAAGUC | 1728 | gsusggaaGfgGfAfAfgguggaagucL96 | 2824 | sense | 21 |
| GACUUCCACCUUCCCUUCCACAG | 1729 | gsAfscuuCfcAfCfcuucCfcUfuccacsasg | 2825 | antisense | 23 |
| GGCGAGCUUGCCACUGUGAGA | 1730 | gsgscgagCfuUfGfCfcacugugagaL96 | 2826 | sense | 21 |
| UCUCACAGUGGCAAGCUCGCCGU | 1731 | usCfsucaCfaGfUfggcaAfgCfucgccsgsu | 2827 | antisense | 23 |
| GCGAGCUUGCCACUGUGAGAG | 1732 | gscsgagcUfuGfCfCfacugugagagL96 | 2828 | sense | 21 |
| CUCUCACAGUGGCAAGCUCGCCG | 1733 | csUfscucAfcAfGfuggcAfaGfcucgcscsg | 2829 | antisense | 23 |
| GGACGGCGAGCUUGCCACUGU | 1734 | gsgsacggCfgAfGfCfuugccacuguL96 | 2830 | sense | 21 |
| ACAGUGGCAAGCUCGCCGUCCAC | 1735 | asCfsaguGfgCfAfagcuCfgCfcguccsasc | 2831 | antisense | 23 |
| UGGACGGCGAGCUUGCCACUG | 1736 | usgsgacgGfcGfAfGfcuugccacugL96 | 2832 | sense | 21 |
| CAGUGGCAAGCUCGCCGUCCACA | 1737 | csAfsgugGfcAfAfgcucGfcCfguccascsa | 2833 | antisense | 23 |
| AUGUGCGUAACAGAUUCAAAC | 1738 | asusgugcGfuAfAfCfagauucaaacL96 | 2834 | sense | 21 |
| GUUUGAAUCUGUUACGCACAUCA | 1739 | gsUfsuugAfaUfCfuguuAfcGfcacauscsa | 2835 | antisense | 23 |
| UGUGCGUAACAGAUUCAAACU | 1740 | usgsugcgUfaAfCfAfgauucaaacuL96 | 2836 | sense | 21 |
| AGUUUGAAUCUGUUACGCACAUC | 1741 | asGfsuuuGfaAfUfcuguUfaCfgcacasusc | 2837 | antisense | 23 |
| GAUGAUGUGCGUAACAGAUUC | 1742 | gsasugauGfuGfCfGfuaacagauucL96 | 2838 | sense | 21 |
| GAAUCUGUUACGCACAUCAUCCA | 1743 | gsAfsaucUfgUfUfacgcAfcAfucaucscsa | 2839 | antisense | 23 |
| GGAUGAUGUGCGUAACAGAUU | 1744 | gsgsaugaUfgUfGfCfguaacagauuL96 | 2840 | sense | 21 |
| AAUCUGUUACGCACAUCAUCCAG | 1745 | asAfsucuGfuUfAfcgcaCfaUfcauccsasg | 2841 | antisense | 23 |
| GGGUCAGCAUGCCAAUAUGUG | 1746 | gsgsgucaGfcAfUfGfccaauaugugL96 | 2842 | sense | 21 |
| CACAUAUUGGCAUGCUGACCCUC | 1747 | csAfscauAfuUfGfgcauGfcUfgacccsusc | 2843 | antisense | 23 |
| GGUCAGCAUGCCAAUAUGUGU | 1748 | gsgsucagCfaUfGfCfcaauauguguL96 | 2844 | sense | 21 |
| ACACAUAUUGGCAUGCUGACCCU | 1749 | asCfsacaUfaUfUfggcaUfgCfugaccscsu | 2845 | antisense | 23 |
| CAGAGGGUCAGCAUGCCAAUA | 1750 | csasgaggGfuCfAfGfcaugccaauaL96 | 2846 | sense | 21 |
| UAUUGGCAUGCUGACCCUCUGUC | 1751 | usAfsuugGfcAfUfgcugAfcCfcucugsusc | 2847 | antisense | 23 |
| ACAGAGGGUCAGCAUGCCAAU | 1752 | ascsagagGfgUfCfAfgcaugccaauL96 | 2848 | sense | 21 |
| AUUGGCAUGCUGACCCUCUGUCC | 1753 | asUfsuggCfaUfGfcugaCfcCfucuguscsc | 2849 | antisense | 23 |
| GCUUGAAUGGGAUCUUGGUGU | 1754 | gscsuugaAfuGfGfGfaucuugguguL96 | 2850 | sense | 21 |
| ACACCAAGAUCCCAUUCAAGCCA | 1755 | asCfsaccAfaGfAfucccAfuUfcaagcscsa | 2851 | antisense | 23 |
| CUUGAAUGGGAUCUUGGUGUC | 1756 | csusugaaUfgGfGfAfucuuggugucL96 | 2852 | sense | 21 |
| GACACCAAGAUCCCAUUCAAGCC | 1757 | gsAfscacCfaAfGfauccCfaUfucaagscsc | 2853 | antisense | 23 |
| CAUGGCUUGAAUGGGAUCUUG | 1758 | csasuggcUfuGfAfAfugggaucuugL96 | 2854 | sense | 21 |
| CAAGAUCCCAUUCAAGCCAUGUU | 1759 | csAfsagaUfcCfCfauucAfaGfccaugsusu | 2855 | antisense | 23 |
| ACAUGGCUUGAAUGGGAUCUU | 1760 | ascsauggCfuUfGfAfaugggaucuuL96 | 2856 | sense | 21 |
| AAGAUCCCAUUCAAGCCAUGUUU | 1761 | asAfsgauCfcCfAfuucaAfgCfcaugususu | 2857 | antisense | 23 |
| UCAAAUGGCUGAGAAGACUGA | 1762 | uscsaaauGfgCfUfGfagaagacugaL96 | 2858 | sense | 21 |
| UCAGUCUUCUCAGCCAUUUGAUA | 1763 | usCfsaguCfuUfCfucagCfcAfuuugasusa | 2859 | antisense | 23 |
| CAAAUGGCUGAGAAGACUGAC | 1764 | csasaaugGfcUfGfAfgaagacugacL96 | 2860 | sense | 21 |
| GUCAGUCUUCUCAGCCAUUUGAU | 1765 | gsUfscagUfcUfUfcucaGfcCfauuugsasu | 2861 | antisense | 23 |
| GAUAUCAAAUGGCUGAGAAGA | 1766 | gsasuaucAfaAfUfGfgcugagaagaL96 | 2862 | sense | 21 |
| UCUUCUCAGCCAUUUGAUAUCUU | 1767 | usCfsuucUfcAfGfccauUfuGfauaucsusu | 2863 | antisense | 23 |
| AGAUAUCAAAUGGCUGAGAAG | 1768 | asgsauauCfaAfAfUfggcugagaagL96 | 2864 | sense | 21 |
| CUUCUCAGCCAUUUGAUAUCUUC | 1769 | csUfsucuCfaGfCfcauuUfgAfuaucususc | 2865 | antisense | 23 |
| GAAAGUCAUCGACAAGACAUU | 1770 | gsasaaguCfaUfCfGfacaagacauuL96 | 2866 | sense | 21 |
| AAUGUCUUGUCGAUGACUUUCAC | 1771 | asAfsuguCfuUfGfucgaUfgAfcuuucsasc | 2867 | antisense | 23 |
| AAAGUCAUCGACAAGACAUUG | 1772 | asasagucAfuCfGfAfcaagacauugL96 | 2868 | sense | 21 |
| CAAUGUCUUGUCGAUGACUUUCA | 1773 | csAfsaugUfcUfUfgucgAfuGfacuuuscsa | 2869 | antisense | 23 |
| AUGUGAAAGUCAUCGACAAGA | 1774 | asusgugaAfaGfUfCfaucgacaagaL96 | 2870 | sense | 21 |
| UCUUGUCGAUGACUUUCACAUUC | 1775 | usCfsuugUfcGfAfugacUfuUfcacaususc | 2871 | antisense | 23 |
| AAUGUGAAAGUCAUCGACAAG | 1776 | asasugugAfaAfGfUfcaucgacaagL96 | 2872 | sense | 21 |
| CUUGUCGAUGACUUUCACAUUCU | 1777 | csUfsuguCfgAfUfgacuUfuCfacauuscsu | 2873 | antisense | 23 |
| GGCUAAUUUGUAUCAAUGAUU | 1778 | gsgscuaaUfuUfGfUfaucaaugauuL96 | 2874 | sense | 21 |
| AAUCAUUGAUACAAAUUAGCCGG | 1779 | asAfsucaUfuGfAfuacaAfaUfuagccsgsg | 2875 | antisense | 23 |
| GCUAAUUUGUAUCAAUGAUUA | 1780 | gscsuaauUfuGfUfAfucaaugauuaL96 | 2876 | sense | 21 |
| UAAUCAUUGAUACAAAUUAGCCG | 1781 | usAfsaucAfuUfGfauacAfaAfuuagcscsg | 2877 | antisense | 23 |
| CCCCGGCUAAUUUGUAUCAAU | 1782 | cscsccggCfuAfAfUfuuguaucaauL96 | 2878 | sense | 21 |
| AUUGAUACAAAUUAGCCGGGGGA | 1783 | asUfsugaUfaCfAfaauuAfgCfcggggsgsa | 2879 | antisense | 23 |
| CCCCCGGCUAAUUUGUAUCAA | 1784 | cscscccgGfcUfAfAfuuuguaucaaL96 | 2880 | sense | 21 |
| UUGAUACAAAUUAGCCGGGGGAG | 1785 | usUfsgauAfcAfAfauuaGfcCfgggggsasg | 2881 | antisense | 23 |
| UGUCGACUUCUGUUUUAGGAC | 1786 | usgsucgaCfuUfCfUfguuuuaggacL96 | 2882 | sense | 21 |
| GUCCUAAAACAGAAGUCGACAGA | 1787 | gsUfsccuAfaAfAfcagaAfgUfcgacasgsa | 2883 | antisense | 23 |
| GUCGACUUCUGUUUUAGGACA | 1788 | gsuscgacUfuCfUfGfuuuuaggacaL96 | 2884 | sense | 21 |
| UGUCCUAAAACAGAAGUCGACAG | 1789 | usGfsuccUfaAfAfacagAfaGfucgacsasg | 2885 | antisense | 23 |
| GAUCUGUCGACUUCUGUUUUA | 1790 | gsasucugUfcGfAfCfuucuguuuuaL96 | 2886 | sense | 21 |
| UAAAACAGAAGUCGACAGAUCUG | 1791 | usAfsaaaCfaGfAfagucGfaCfagaucsusg | 2887 | antisense | 23 |
| AGAUCUGUCGACUUCUGUUUU | 1792 | asgsaucuGfuCfGfAfcuucuguuuuL96 | 2888 | sense | 21 |
| AAAACAGAAGUCGACAGAUCUGU | 1793 | asAfsaacAfgAfAfgucgAfcAfgaucusgsu | 2889 | antisense | 23 |
| CCGAGAAGUCACCAAGAAGCU | 1794 | cscsgagaAfgUfCfAfccaagaagcuL96 | 2890 | sense | 21 |
| AGCUUCUUGGUGACUUCUCGGUC | 1795 | asGfscuuCfuUfGfgugaCfuUfcucggsusc | 2891 | antisense | 23 |
| CGAGAAGUCACCAAGAAGCUA | 1796 | csgsagaaGfuCfAfCfcaagaagcuaL96 | 2892 | sense | 21 |
| UAGCUUCUUGGUGACUUCUCGGU | 1797 | usAfsgcuUfcUfUfggugAfcUfucucgsgsu | 2893 | antisense | 23 |
| AGGACCGAGAAGUCACCAAGA | 1798 | asgsgaccGfaGfAfAfgucaccaagaL96 | 2894 | sense | 21 |
| UCUUGGUGACUUCUCGGUCCUUG | 1799 | usCfsuugGfuGfAfcuucUfcGfguccususg | 2895 | antisense | 23 |
| AAGGACCGAGAAGUCACCAAG | 1800 | asasggacCfgAfGfAfagucaccaagL96 | 2896 | sense | 21 |
| CUUGGUGACUUCUCGGUCCUUGU | 1801 | csUfsuggUfgAfCfuucuCfgGfuccuusgsu | 2897 | antisense | 23 |
| AAACAUGGCUUGAAUGGGAUC | 1802 | asasacauGfgCfUfUfgaaugggaucL96 | 2898 | sense | 21 |
| GAUCCCAUUCAAGCCAUGUUUAA | 1803 | gsAfsuccCfaUfUfcaagCfcAfuguuusasa | 2899 | antisense | 23 |
| AACAUGGCUUGAAUGGGAUCU | 1804 | asascaugGfcUfUfGfaaugggaucuL96 | 2900 | sense | 21 |
| AGAUCCCAUUCAAGCCAUGUUUA | 1805 | asGfsaucCfcAfUfucaaGfcCfauguususa | 2901 | antisense | 23 |
| UGUUAAACAUGGCUUGAAUGG | 1806 | usgsuuaaAfcAfUfGfgcuugaauggL96 | 2902 | sense | 21 |
| CCAUUCAAGCCAUGUUUAACAGC | 1807 | csCfsauuCfaAfGfccauGfuUfuaacasgsc | 2903 | antisense | 23 |
| CUGUUAAACAUGGCUUGAAUG | 1808 | csusguuaAfaCfAfUfggcuugaaugL96 | 2904 | sense | 21 |
| CAUUCAAGCCAUGUUUAACAGCC | 1809 | csAfsuucAfaGfCfcaugUfuUfaacagscsc | 2905 | antisense | 23 |
| GACUUGCUGCAUAUGUGGCUA | 1810 | gsascuugCfuGfCfAfuauguggcuaL96 | 2906 | sense | 21 |
| UAGCCACAUAUGCAGCAAGUCCA | 1811 | usAfsgccAfcAfUfaugcAfgCfaagucscsa | 2907 | antisense | 23 |
| ACUUGCUGCAUAUGUGGCUAA | 1812 | ascsuugcUfgCfAfUfauguggcuaaL96 | 2908 | sense | 21 |
| UUAGCCACAUAUGCAGCAAGUCC | 1813 | usUfsagcCfaCfAfuaugCfaGfcaaguscsc | 2909 | antisense | 23 |
| AGUGGACUUGCUGCAUAUGUG | 1814 | asgsuggaCfuUfGfCfugcauaugugL96 | 2910 | sense | 21 |
| CACAUAUGCAGCAAGUCCACUGU | 1815 | csAfscauAfuGfCfagcaAfgUfccacusgsu | 2911 | antisense | 23 |
| CAGUGGACUUGCUGCAUAUGU | 1816 | csasguggAfcUfUfGfcugcauauguL96 | 2912 | sense | 21 |
| ACAUAUGCAGCAAGUCCACUGUC | 1817 | asCfsauaUfgCfAfgcaaGfuCfcacugsusc | 2913 | antisense | 23 |
| UAAAUCAGUACUUCCAAAGUC | 1818 | usasaaucAfgUfAfCfuuccaaagucL96 | 2914 | sense | 21 |
| GACUUUGGAAGUACUGAUUUAGC | 1819 | gsAfscuuUfgGfAfaguaCfuGfauuuasgsc | 2915 | antisense | 23 |
| AAAUCAGUACUUCCAAAGUCU | 1820 | asasaucaGfuAfCfUfuccaaagucuL96 | 2916 | sense | 21 |
| AGACUUUGGAAGUACUGAUUUAG | 1821 | asGfsacuUfuGfGfaaguAfcUfgauuusasg | 2917 | antisense | 23 |
| AUGCUAAAUCAGUACUUCCAA | 1822 | asusgcuaAfaUfCfAfguacuuccaaL96 | 2918 | sense | 21 |
| UUGGAAGUACUGAUUUAGCAUGU | 1823 | usUfsggaAfgUfAfcugaUfuUfagcausgsu | 2919 | antisense | 23 |
| CAUGCUAAAUCAGUACUUCCA | 1824 | csasugcuAfaAfUfCfaguacuuccaL96 | 2920 | sense | 21 |
| UGGAAGUACUGAUUUAGCAUGUU | 1825 | usGfsgaaGfuAfCfugauUfuAfgcaugsusu | 2921 | antisense | 23 |
| UCCUCAAUUGAAGAAGUGGCG | 1826 | uscscucaAfuUfGfAfagaaguggcgL96 | 2922 | sense | 21 |
| CGCCACUUCUUCAAUUGAGGAGG | 1827 | csGfsccaCfuUfCfuucaAfuUfgaggasgsg | 2923 | antisense | 23 |
| CCUCAAUUGAAGAAGUGGCGG | 1828 | cscsucaaUfuGfAfAfgaaguggcggL96 | 2924 | sense | 21 |
| CCGCCACUUCUUCAAUUGAGGAG | 1829 | csCfsgccAfcUfUfcuucAfaUfugaggsasg | 2925 | antisense | 23 |
| CACCUCCUCAAUUGAAGAAGU | 1830 | csasccucCfuCfAfAfuugaagaaguL96 | 2926 | sense | 21 |
| ACUUCUUCAAUUGAGGAGGUGGC | 1831 | asCfsuucUfuCfAfauugAfgGfaggugsgsc | 2927 | antisense | 23 |
| CCACCUCCUCAAUUGAAGAAG | 1832 | cscsaccuCfcUfCfAfauugaagaagL96 | 2928 | sense | 21 |
| CUUCUUCAAUUGAGGAGGUGGCC | 1833 | csUfsucuUfcAfAfuugaGfgAfgguggscsc | 2929 | antisense | 23 |
| CAAGAUGUCCUCGAGAUACUA | 1834 | csasagauGfuCfCfUfcgagauacuaL96 | 2930 | sense | 21 |
| UAGUAUCUCGAGGACAUCUUGAA | 1835 | usAfsguaUfcUfCfgaggAfcAfucuugsasa | 2931 | antisense | 23 |
| AAGAUGUCCUCGAGAUACUAA | 1836 | asasgaugUfcCfUfCfgagauacuaaL96 | 2932 | sense | 21 |
| UUAGUAUCUCGAGGACAUCUUGA | 1837 | usUfsaguAfuCfUfcgagGfaCfaucuusgsa | 2933 | antisense | 23 |
| UGUUCAAGAUGUCCUCGAGAU | 1838 | usgsuucaAfgAfUfGfuccucgagauL96 | 2934 | sense | 21 |
| AUCUCGAGGACAUCUUGAACACC | 1839 | asUfscucGfaGfGfacauCfuUfgaacascsc | 2935 | antisense | 23 |
| GUGUUCAAGAUGUCCUCGAGA | 1840 | gsusguucAfaGfAfUfguccucgagaL96 | 2936 | sense | 21 |
| UCUCGAGGACAUCUUGAACACCU | 1841 | usCfsucgAfgGfAfcaucUfuGfaacacscsu | 2937 | antisense | 23 |
| ACAUGCUAAAUCAGUACUUCC | 1842 | ascsaugcUfaAfAfUfcaguacuuccL96 | 2938 | sense | 21 |
| GGAAGUACUGAUUUAGCAUGUUG | 1843 | gsGfsaagUfaCfUfgauuUfaGfcaugususg | 2939 | antisense | 23 |
| CAUGCUAAAUCAGUACUUCCA | 1844 | csasugcuAfaAfUfCfaguacuuccaL96 | 2940 | sense | 21 |
| UGGAAGUACUGAUUUAGCAUGUU | 1845 | usGfsgaaGfuAfCfugauUfuAfgcaugsusu | 2941 | antisense | 23 |
| AACAACAUGCUAAAUCAGUAC | 1846 | asascaacAfuGfCfUfaaaucaguacL96 | 2942 | sense | 21 |
| GUACUGAUUUAGCAUGUUGUUCA | 1847 | gsUfsacuGfaUfUfuagcAfuGfuuguuscsa | 2943 | antisense | 23 |
| GAACAACAUGCUAAAUCAGUA | 1848 | gsasacaaCfaUfGfCfuaaaucaguaL96 | 2944 | sense | 21 |
| UACUGAUUUAGCAUGUUGUUCAU | 1849 | usAfscugAfuUfUfagcaUfgUfuguucsasu | 2945 | antisense | 23 |
| GAAAGGCACUGAUGUUCUGAA | 1850 | gsasaaggCfaCfUfGfauguucugaaL96 | 2946 | sense | 21 |
| UUCAGAACAUCAGUGCCUUUCCG | 1851 | usUfscagAfaCfAfucagUfgCfcuuucscsg | 2947 | antisense | 23 |
| AAAGGCACUGAUGUUCUGAAA | 1852 | asasaggcAfcUfGfAfuguucugaaaL96 | 2948 | sense | 21 |
| UUUCAGAACAUCAGUGCCUUUCC | 1853 | usUfsucaGfaAfCfaucaGfuGfccuuuscsc | 2949 | antisense | 23 |
| UGCGGAAAGGCACUGAUGUUC | 1854 | usgscggaAfaGfGfCfacugauguucL96 | 2950 | sense | 21 |
| GAACAUCAGUGCCUUUCCGCACA | 1855 | gsAfsacaUfcAfGfugccUfuUfccgcascsa | 2951 | antisense | 23 |
| GUGCGGAAAGGCACUGAUGUU | 1856 | gsusgcggAfaAfGfGfcacugauguuL96 | 2952 | sense | 21 |
| AACAUCAGUGCCUUUCCGCACAC | 1857 | asAfscauCfaGfUfgccuUfuCfcgcacsasc | 2953 | antisense | 23 |
| GUCAGCAUGCCAAUAUGUGUG | 1858 | gsuscagcAfuGfCfCfaauaugugugL96 | 2954 | sense | 21 |
| CACACAUAUUGGCAUGCUGACCC | 1859 | csAfscacAfuAfUfuggcAfuGfcugacscsc | 2955 | antisense | 23 |
| UCAGCAUGCCAAUAUGUGUGG | 1860 | uscsagcaUfgCfCfAfauauguguggL96 | 2956 | sense | 21 |
| CCACACAUAUUGGCAUGCUGACC | 1861 | csCfsacaCfaUfAfuuggCfaUfgcugascsc | 2957 | antisense | 23 |
| GAGGGUCAGCAUGCCAAUAUG | 1862 | gsasggguCfaGfCfAfugccaauaugL96 | 2958 | sense | 21 |
| CAUAUUGGCAUGCUGACCCUCUG | 1863 | csAfsuauUfgGfCfaugcUfgAfcccucsusg | 2959 | antisense | 23 |
| AGAGGGUCAGCAUGCCAAUAU | 1864 | asgsagggUfcAfGfCfaugccaauauL96 | 2960 | sense | 21 |
| AUAUUGGCAUGCUGACCCUCUGU | 1865 | asUfsauuGfgCfAfugcuGfaCfccucusgsu | 2961 | antisense | 23 |
| GAUGCUCCGGAAUGUUGCUGA | 1866 | gsasugcuCfcGfGfAfauguugcugaL96 | 2962 | sense | 21 |
| UCAGCAACAUUCCGGAGCAUCCU | 1867 | usCfsagcAfaCfAfuuccGfgAfgcaucscsu | 2963 | antisense | 23 |
| AUGCUCCGGAAUGUUGCUGAA | 1868 | asusgcucCfgGfAfAfuguugcugaaL96 | 2964 | sense | 21 |
| UUCAGCAACAUUCCGGAGCAUCC | 1869 | usUfscagCfaAfCfauucCfgGfagcauscsc | 2965 | antisense | 23 |
| CAAGGAUGCUCCGGAAUGUUG | 1870 | csasaggaUfgCfUfCfcggaauguugL96 | 2966 | sense | 21 |
| CAACAUUCCGGAGCAUCCUUGGA | 1871 | csAfsacaUfuCfCfggagCfaUfccuugsgsa | 2967 | antisense | 23 |
| CCAAGGAUGCUCCGGAAUGUU | 1872 | cscsaaggAfuGfCfUfccggaauguuL96 | 2968 | sense | 21 |
| AACAUUCCGGAGCAUCCUUGGAU | 1873 | asAfscauUfcCfGfgagcAfuCfcuuggsasu | 2969 | antisense | 23 |
| GCGUAACAGAUUCAAACUGCC | 1874 | gscsguaaCfaGfAfUfucaaacugccL96 | 2970 | sense | 21 |
| GGCAGUUUGAAUCUGUUACGCAC | 1875 | gsGfscagUfuUfGfaaucUfgUfuacgcsasc | 2971 | antisense | 23 |
| CGUAACAGAUUCAAACUGCCG | 1876 | csgsuaacAfgAfUfUfcaaacugccgL96 | 2972 | sense | 21 |
| CGGCAGUUUGAAUCUGUUACGCA | 1877 | csGfsgcaGfuUfUfgaauCfuGfuuacgscsa | 2973 | antisense | 23 |
| AUGUGCGUAACAGAUUCAAAC | 1878 | asusgugcGfuAfAfCfagauucaaacL96 | 2974 | sense | 21 |
| GUUUGAAUCUGUUACGCACAUCA | 1879 | gsUfsuugAfaUfCfuguuAfcGfcacauscsa | 2975 | antisense | 23 |
| GAUGUGCGUAACAGAUUCAAA | 1880 | gsasugugCfgUfAfAfcagauucaaaL96 | 2976 | sense | 21 |
| UUUGAAUCUGUUACGCACAUCAU | 1881 | usUfsugaAfuCfUfguuaCfgCfacaucsasu | 2977 | antisense | 23 |
| AGAGAAGAUGGGCUACAAGGC | 1882 | asgsagaaGfaUfGfGfgcuacaaggcL96 | 2978 | sense | 21 |
| GCCUUGUAGCCCAUCUUCUCUGC | 1883 | gsCfscuuGfuAfGfcccaUfcUfucucusgsc | 2979 | antisense | 23 |
| GAGAAGAUGGGCUACAAGGCC | 1884 | gsasgaagAfuGfGfGfcuacaaggccL96 | 2980 | sense | 21 |
| GGCCUUGUAGCCCAUCUUCUCUG | 1885 | gsGfsccuUfgUfAfgcccAfuCfuucucsusg | 2981 | antisense | 23 |
| AGGCAGAGAAGAUGGGCUACA | 1886 | asgsgcagAfgAfAfGfaugggcuacaL96 | 2982 | sense | 21 |
| UGUAGCCCAUCUUCUCUGCCUGC | 1887 | usGfsuagCfcCfAfucuuCfuCfugccusgsc | 2983 | antisense | 23 |
| CAGGCAGAGAAGAUGGGCUAC | 1888 | csasggcaGfaGfAfAfgaugggcuacL96 | 2984 | sense | 21 |
| GUAGCCCAUCUUCUCUGCCUGCC | 1889 | gsUfsagcCfcAfUfcuucUfcUfgccugscsc | 2985 | antisense | 23 |

### Example 2. A Single Dose of AD-84788 Potently Inhibits Ldha Expression and Activity In Vivo

[0884] The effect of AD-84788 on the level of expression of Ldha in vivo was evaluated in C57BL/6J wild-type mice by subcutaneous administration of a single 0.1 mg/kg, 0.3 mg/kg, 1.0 mg/kg, 3.0 mg/kg, or 10 mg/kg dose of AD-84788. Forty-eight hours after administration, mice were euthanized and the livers were dissected and flash frozen in liquid nitrogen. Livers were ground and approximately 10 mg of liver powder per sample was used for RNA isolation. RNA concentration was measured, adjusted to 100 ng/μl, cDNA was prepared, and RT-PCR analysis was performed as described above.

[0885] The results of these assays are depicted in FIG. 2 which demonstrates that a single 1 mg/kg, 3 mg/kg or 10 mg/kg dose of AD-84788 potently inhibits Ldha expression.

[0886] The effects of a single 0.1 mg/kg, 0.3 mg/kg, 1.0 mg/kg, 3.0 mg/kg, or 10 mg/kg subcutaneous dose of AD-84788 on hepatic Ldha enzyme activity was evaluated in Agxt deficient mice.

[0887] Agxt deficient mice have a targeted disruption of the alanine-glyoxylate amino transferase gene (Agxt) (Salido, et al. (2006) Proc. Natl. Acad. Sci. U.S.A. 103:18249). Mutant mice develop normally, but exhibit hyperoxaluria and calcium oxalate crystal formation. These Agxt knock-out mice are a recognized animal model of primary hyperoxaluria type I, a rare disease characterized by excessive hepatic oxalate production that leads to renal failure and which is casued by mutations in the AGXT gene.

[0888] Liver LDH enzyme activity was measured by the reduction of NAD to NADH in liver tissue lysates. Four weeks after administration, mice were euthanized and liver samples were collected and processed. Briefly, liver samples were weighed, homogenized in lysis buffer (25 mM HEPES, 1% Triton, 1% protease inhibitor) and homogenates were centrifuged to pellet cell debris. The supernantants were recovered, and solutions of NAD and either lactic acid or glyoxylate were added. The samples were placed into a multi-well plate and placed into a plate reader. Absorbance readings at 340 nm were collected for 20 minutes at 1 minute intervals. The data was used to calculate LDHA specific activity (nmoles of LDHA activity/min/mg protein).

[0889] The results of these assays are depicted in FIG. 3 which demonstrates that a single 0.3 mg/kg, 1 mg/kg, 3 mg/kg or 10 mg/kg dose of AD-84788 potently inhibits Ldha enzyme activity.

### Example 3. AD-84788 Potently Reduces Endogenous LDHA Expression, LDHA Activity, and Oxalate Levels In Vivo

[0890] The effect of AD-84788 on endogenous oxalate production in vivo was evaluated in wild-type mice, Agxt deficient mice, and Grhpr knockout mice

[0891] Grhpr deficient mice have a targeted disruption of the glyoxylate reductase/hydroxypyruvate reductase (Grhpr) gene (see, e.g., Knight et al., (2011) Am J Physiol Renal Physiol 302(6): F688-F693). Mutant mice exhibit no difference in growth and development, but exhibit nephrocalcinosis including deposits of calcium oxalate in cortical and medullary tubules. Grhpr knock-out mice are an art recognized animal model of primary hyperoxaluria type II, an inherited disease characterized by excessive production of oxalate caused by mutations in the Grhpr gene.

[0892] Methods and Materials

[0893] Animals

[0894] Adult (12-14 weeks of age) male Agt deficient (Agxt Ko) mice on a C57BL/6J background, Grhpr deficient (Grhpr Ko) mice, and wild type litter mates were used for these studies. Mice were maintained in a barrier facility with a 12:12-hour light-dark cycle and an ambient temperature of 23±1° C. and had free access to food and water. All mice were placed on an ultra low oxalate diet to eliminate dietary oxalate contributions, e.g., so that urinary oxalate excretion levels represent substantially only endogenous oxalate production. All animal studies were approved by the Institutional Animal Use and Care Committee.

[0895] Metabolic Cage Urine Collections

[0896] For metabolic cage urine collections, animals were singly housed in Nalgene metabolic cages for collection of 24-hour urines, as previously described (Li, et. al. (2016) Biochimica et Biophysica Acta 1862:233). Three to four 24-hour urines were performed for each mouse before and after administration of an iRNA agent. The mean of these collections was used to characterize the urinary oxalate excretion of each animal.

[0897] LDHA iRNA Administration

[0898] The effect and durability of AD-84788 on urinary oxalate excretion was determined by administering Agxt deficient mice (n=6) a single 0.3 mg/kg, 1 mg/kg, 3 mg/kg, or 10 mg/kg dose of AD-84788 diluted in sterile 0.9% sodium chloride on Day 0. Twenty-four-hour urines were collected on weeks 1, 2, 3, 4, 6, 8, 9, and 10 post-dose. Baseline twenty-four-hour urine collections were also performed prior to the administration of AD-84788.

[0899] The effect of AD-84788 on urinary oxalate excretion was further determined by administering wild-type mice (n=6), Agxt mice (n=6) or Grhpr mice (n=6) a single 10 mg/kg dose of AD-84788 diluted in sterile 0.9% sodium chloride on Day 0. Twenty-four-hour urine samples were collected on days 7-10 post-dose. Baseline twenty-four-hour urine collections were also performed prior to the administration of AD-84788

[0900] The effect of multi-dose administration of AD-84788 on urinary oxalate excretion and was also determined Agxt mice (n=6). Agxt deficient mice were administered a 10 mg/kg dose of AD-84788 on Days 0, 11, 18, and 25. Twenty-four-hour urines were collected on Days −6, −5, −4, and −3 pre-dose. Twenty-four-hour urines were also collected on Days 7, 8, 9, and 10 post-dose; and on Days 28, 29, 30, and 31 post-dose.

[0901] Following completion of 24-hour urine collections (Day 32 post-dose), tissue was collected to determine inhibition of LDHA protein and activity by enzymatic assays. Animals were fasted for 6 hours and anesthetized with vaporized isoflurane (Fluriso, MWI, Boise Id.) prior to tissue procurement. A schematic of this multi-dose study protocol is provided in FIG. 4.

[0902] Analytical Methods

[0903] Urinary oxalate levels were determined by ion chromatography coupled with mass spectroscopy (ICMS), as previously described (Li, et. al. (2016) Biochimica et Biophysica Acta 1862:233). Liver lactate was determined by ICMS (Knight, et. al. (2012). Anal Biochem. 421:121-124), and pyruvate and glyoxylate levels by HPLC (Knight and Holme s(2005) Am J Nephrol 25:171). Prior to lactate, pyruvate and glyoxylate measurements, tissue was extracted in trichloroacetic acid (final 10% v/v).

[0904] Liver LDH Enzyme Assay—Lactic Acid or Glyoxylate Substrates

[0905] Liver LDH enzyme activity was measured by the reduction of NAD to NADH in liver tissue lysates. Briefly, liver samples were weighed, homogenized in lysis buffer (25 mM HEPES, 1% Triton, 1% protease inhibitor) and homogenates were centrifuged to pellet cell debris. The supernantants were recovered, and solutions of NAD and either lactic acid or glyoxylate were added. The samples were placed into a multi-well plate and placed into a plate reader. Absornace readings at 340 nm were collected for 20 minutes at 1 minute intervals. The data was used to calculate LDHA specific activity (nmoles of LDHA activity/min/mg protein).

[0906] Heart and Thigh Skeletal Muscle LDH Enzyme Assay

[0907] Heart and thigh skeletal muscle LDH enzyme activity was also measured using lactic acid as a substrate. Briefly, liver samples were weighed, homogenized in lysis buffer (25 mM HEPES, 1% Triton, 1% protease inhibitor) and homogenates were centrifuged to pellet cell debris. The supernantants were recovered, and solutions of NAD and lactic acid were added. The samples were placed into a multi-well plate and placed into a plate reader. Absornace readings at 340 nm were collected for 20 minutes at 1 minute intervals. The data was used to calculate LDHA specific activity (nmoles of LDHA activity/min/mg protein).

[0908] Results

[0909] The effect and durability of LDHA inhibtion on endogenous oxalate excretion was also assessed and, as depicted in FIG. 5, compared to untreated control animals, administration of a single 0.3 mg/kg 1 mg/kg, 3 mg/kg or 10 mg/kg dose of AD-84788 decreased urinary oxalate excretion for at least 4 weeks post-dose of AD-84788.

[0910] Furthermore, as depicted in FIG. 6, four weeks after the administration of a single 10 mg/kg dose of siRNA, the level of endogenous oxalate excreted in the urine of Agxt deficient mice was significantly reduced by about 75%±3% compared to baseline, and the level of endogenous oxalate excretion in the urine of Grhpr deficient mice was reduced by about 32%±5%

[0911] As depicted in FIG. 7, at one week following a single 10 mg/kg dose of AD-84788, the level of endogenous oxalate excreted in the urine of Agxt deficient mice was decreased. After the administration of four 10 mg/kg doses of AD-84788, endogenous oxalate levels excreted in the urine of Agxt deficient mice were unexpectedly reduced by about 75±3% from baseline levels of 120 mg/dl, demonstrating that decreasing the level of Ldha decreases the level of excreted oxalate and, thus, is useful for treating subjects having a kidney stone formation disease, disorder, or condition (e.g., a subject having a non-hyperoxaluria kidney stone formation disease, disorder, or condition).

[0912] The effect of administration of four 10 mg/kg doses of AD-84788 on the levels of Ldha protein was also assessed by measuring the enzymic activity of Ldha present in liver samples from both wild-type and Agxt mice using either lactic acid or glyoxylate as a substrate. FIGS. 8A, 8B, 9A, and 9B demonstrate that, compared to untreated control animals, after the administration of four 10 mg/kg doses of AD-84788 to wild-type mice, significantly decreased liver LDH enzymatic activity as measured by the reduction of NAD to NADH using either lactic acid (FIGS. 8A and 8B) or glyoxylate (FIGS. 9A and 9B).

[0913] Similarly, in Agxt mice, compared to untreated control animals, after the administration of four 10 mg/kg doses of AD-84788 significantly decreased liver LDH enzymatic activity as measured by the reduction of NAD to NADH using either lactic acid (FIGS. 10A and 10B) or glyoxylate (FIGS. 11A and 11B).

[0914] Lactate dehydrogenase is present throughout the body and the use of iRNA agents targeting LDHA may have systemic effects. However, as depicted in FIGS. 12A-12D, the reduction in LDH enzymatic activity by administration of AD-84788 (i.e., an iRNA agent conjugated to a GalNAc ligand which targets hepatocytes) is specific to the LDH present in the liver. In particular, compared to untreated control animals, administration of four 10 mg/kg doses of AD-84788 to wild-type mice does not significantly reduce either heart (FIGS. 12A and 12B) or skeletal muscle (FIGS. 12C and 12D) LDH enzymatic activity using lactic acid (FIGS. 8A and 8B) as a substrate.

[0915] Furthermore, the reduction of Ldha levels by administration of four 10 mg/kg doses of AD-84788 to either wild-type of Agxt deficient mice did not increase liver or muscle lactate levels. In fact, in both wild-type (FIG. 13A) and Agxt deficient mice (FIG. 14A), lactate levels were significantly decreased in animals administered multiple doses of AD-84788. In addition, as depicted in FIGS. 13B and 14B, liver pyruvate levels were higher and, as depicted in FIGS. 15A and 15B, liver glyoxylate levels were unchanged in wild-type mice and Agxt deficient mice administered multiple doses of AD-84788. Further despite reduction of liver lactate levels in both the wild-type and Agxt deficient mice after the administration of four 10 mg/kg doses of AD-84788, plasma levels of lactate in both the wild-type and Agxt deficient mice were unaffected (FIGS. 17A and 17B). Notably, during the entirety of the study, the behavior and weights (see FIGS. 16A and 16B) of the treated and untreated control mice remained constant indicating that there were no significant metabolic changes in the animals, thus, demonstrating the safety of specific inhibition of liver Ldha using an iRNA agent such as AD-84788.

[0916] In summary, liver-specific knockdown of LDHA using the dsRNA agents of the invention resulted in profound oxalate lowering in both healthy and diseased animals. Additionally, substantial changes were seen in the levels of lactate, pyruvate and TCA Cycle organic acids in the livers of treated animals, consistent with the role of LDH in carbohydrate metabolism (see, e.g., FIG. 1B). However, none of the treated mice showed signs of behavioral and/or weight changes indicating that there were no significant metabolic changes in the animals. Accordingly, the data presented herein demonstrates the utility of the compositions and methods provided herein to decrease oxalate synthesis in subjects, such as subjects having a kidney stone formation disease, disorder, or condition (e.g., a subject having a non-hyperoxaluria kidney stone formation disease, disorder, or condition) and permit the determination of a suitable decrease in the level of oxalate that is beneficial to such subjects without resulting in adverse effects or safety concerns.

We claim:

1. A double stranded ribonucleic acid (dsRNA) agent for inhibiting expression of lactic acid dehydrogenase A (LDHA) in a cell, wherein the dsRNA agent comprises a sense strand and an antisense strand forming a double stranded region,
wherein the antisense strand comprises at least 19 contiguous nucleotides differing by no more than 3 nucleotides from the nucleotide sequence 5′-AUCAGAUAAAAAGGACAACAUGC-3′ (SEQ ID NO:3406),
wherein the antisense strand is 19-23 nucleotides in length,
wherein all of the nucleotides of the sense strand that comprise the double stranded region are modified nucleotides
wherein all of the nucleotides of the antisense strand are modified nucleotides, and
wherein a ligand comprising one or more N-acetylgalactosamine (GalNAc) derivatives attached through a monovalent, bivalent, or trivalent branched linker is conjugated to at least one strand of the agent.

2. The dsRNA agent of claim 1, wherein the antisense strand comprises at least 20 contiguous nucleotides differing by no more than 3 nucleotides from the nucleotide sequence
(SEQ ID NO: 3406)
5′-AUCAGAUAAAAAGGACAACAUGC-3′.

3. The dsRNA agent of claim 1, wherein the antisense strand comprises at least 21 contiguous nucleotides differing by no more than 3 nucleotides from the nucleotide sequence
(SEQ ID NO: 3406)
5′-AUCAGAUAAAAAGGACAACAUGC-3′.

4. The dsRNA agent of claim 1, wherein at least one of said modified nucleotides is selected from the group consisting of a deoxy-nucleotide, a 3′-terminal deoxy-thymine (dT) nucleotide, a 2′-O-methyl modified nucleotide, a 2′-fluoro modified nucleotide, a 2′-deoxy-modified nucleotide, a locked nucleotide, an unlocked nucleotide, a conformationally restricted nucleotide, a constrained ethyl nucleotide, an abasic nucleotide, a 2′-amino-modified nucleotide, a 2′-O-allyl-modified nucleotide, 2′-C-alkyl-modified nucleotide, 2′-hydroxly-modified nucleotide, a 2′-methoxyethyl modified nucleotide, a 2′-O-alkyl-modified nucleotide, a morpholino nucleotide, a phosphoramidate, a non-natural base comprising nucleotide, a tetrahydropyran modified nucleotide, a 1,5-anhydrohexitol modified nucleotide, a cyclohexenyl modified nucleotide, a nucleotide comprising a phosphorothioate group, a nucleotide comprising a methylphosphonate group, a nucleotide comprising a 5′-phosphate, a nucleotide comprising a 5′-phosphate mimic, a glycol modifice nucleotide, and a 2-O—(N-methylacetamide) modified nucleotide, and combinations thereof.

5. The dsRNA agent of claim 1, wherein the modified nucleotides are selected from the group consisting of a 2′-O-methyl modified nucleotide and a 2′-fluoro modified nucleotide.

6. The dsRNA agent of claim 1, wherein at least one strand comprises a 3′ overhang of at least 1 nucleotide.

7. The dsRNA agent of claim 1, wherein the agent further comprises at least one phosphorothioate or methylphosphonate internucleotide linkage.

8. The dsRNA agent of claim 7, wherein the sense strand comprises at least one phosphorothioate internucleotide linkage at the 3′terminus.

9. The dsRNA agent of claim 7, wherein the antisense strand comprises at least one phosphorothioate internucleotide linkage at the 3′terminus

10. The dsRNA agent of claim 1, wherein the ligand is conjugated to the 3′ end of the sense strand of the dsRNA agent.

11. The dsRNA agent of claim 1, wherein the first base pair of the double stranded region from the 5′ end of the antisense strand is an AU base pair.

12. The dsRNA agent of claim 1, wherein said double stranded region comprises 20 nucleotides.

13. The dsRNA agent of claim 1, wherein said double stranded region exhibits 100% complementarity between the sense and antisense strands.

14. The dsRNA agent of claim 1, wherein the dsRNA agent is capable of knocking down LDHA expression by at least 70% in a cell when provided as a single dose of 10 nM to the cell.

15. The dsRNA agent of claim 1, wherein the dsRNA agent is capable of knocking down LDHA expression by at least 80% in a cell when provided as a single dose of 10 nM to the cell.

16. The dsRNA agent of claim 1, wherein the antisense strand is 22 nucleotides in length.

17. A cell containing the dsRNA agent of claim 1.

18. A pharmaceutical composition for inhibiting expression of a lactic acid dehydrogenase A (LDHA) gene comprising the dsRNA agent of claim 1.

19. The pharmaceutical composition of claim 18, wherein the dsRNA agent is formulated in an unbuffered solution.

20. The pharmaceutical composition of claim 18, wherein the dsRNA agent is formulated with a buffered solution.

21. A method of inhibiting lactic acid dehydrogenase A (LDHA) expression in a cell, the method comprising contacting the cell with the dsRNA agent of claim 1, or the pharmaceutical composition of claim 18, thereby inhibiting expression of LDHA in the cell.

22. The method of claim 21, wherein the cell is within a subject.

23. The method of claim 22, wherein the subject is a human.

24. The method of claim 21, wherein the LDHA expression is inhibited by at least 30%, 40%, 50%, 60%, 70%, 80%, 90% or 95%, or to below the level of detection of LDHA expression.

25. The method of claim 23, wherein the human subject suffers from an oxalate pathway-associated disease, disorder, or condition.

26. The method of claim 25, wherein the oxalate pathway-associated disease, disorder, or condition is an oxalate-associated disease, disorder, or condition, or a lactate dehydrogenase-associated disease, disorder, or condition.

27. The method of claim 26, wherein the oxalate-associated disease, disorder, or condition is a kidney stone formation disease, disorder, or condition, or a calcium oxalate tissue deposition disease, disorder, or condition.

28. The method of claim 26, wherein the lactate dehydrogenase-associated disease, disorder, or condition is selected from the group consisting of cancer, fatty liver (steatosis), nonalcoholic steatohepatitis (NASH), cirrhosis of the liver, accumulation of fat in the liver, inflammation of the liver, hepatocellular necrosis, liver fibrosis, and nonalcoholic fatty liver disease (NAFLD).

29. The method of claim 21, wherein the cell is a liver cell.

30. A method of treating a subject having a disorder that would benefit from a reduction in LDHA expression, the method comprising
administering to the subject a therapeutically effective amount of the dsRNA agent of claim 1, or the pharmaceutical composition of claim 18, thereby treating the subject.

The application's sequence listing, which the Patent Office published only in electronic form, follows.

SEQUENCE LISTING (4150 sequences)

SEQ ID NO: 1 - DNA, 2052 bp, Homo sapiens
gtctgccggtcggttgtctggctgcgcgcgccacccgggcctctccagtgccccgcctggctcggcatccacccccagcccgactcacacgtgggttcccgcacgtccgccggccccccccgctgacgtcagcatagctgttccacttaaggcccctcccgcgcccagctcagagtgctgcagccgctgccgccgattccggatctcattgccacgcgcccccgacgaccgcccgacgtgcattcccgattccttttggttccaagtccaatatggcaactctaaaggatcagctgatttataatcttctaaaggaagaacagaccccccagaataagattacagttgttggggttggtgctgttggcatggcctgtgccatcagtatcttaatgaaggacttggcagatgaacttgctcttgttgatgtcatcgaagacaaattgaagggagagatgatggatctccaacatggcagccttttccttagaacaccaaagattgtctctggcaaagtggatatcttgacctacgtggcttggaagataagtggttttcccaaaaaccgtgttattggaagcggttgcaatctggattcagcccgattccgttacctaatgggggaaaggctgggagttcacccattaagctgtcatgggtgggtccttggggaacatggagattccagtgtgcctgtatggagtggaatgaatgttgctggtgtctctctgaagactctgcacccagatttagggactgataaagataaggaacagtggaaagaggttcacaagcaggtggttgagagtgcttatgaggtgatcaaactcaaaggctacacatcctgggctattggactctctgtagcagatttggcagagagtataatgaagaatcttaggcgggtgcacccagtttccaccatgattaagggtctttacggaataaaggatgatgtcttccttagtgttccttgcattttgggacagaatggaatctcagaccttgtgaaggtgactctgacttctgaggaagaggcccgtttgaagaagagtgcagatacactttgggggatccaaaaggagctgcaattttaaagtcttctgatgtcatatcatttcactgtctaggctacaacaggattctaggtggaggttgtgcatgttgtcctttttatctgatctgtgattaaagcagtaatattttaagatggactgggaaaaacatcaactcctgaagttagaaataagaatggtttgtaaaatccacagctatatcctgatgctggatggtattaatcttgtgtagtcttcaactggttagtgtgaaatagttctgccacctctgacgcaccactgccaatgctgtacgtactgcatttgccccttgagccaggtggatgtttaccgtgtgttatataacttcctggctccttcactgaacatgcctagtccaacattttttcccagtgagtcacatcctgggatccagtgtataaatccaatatcatgtcttgtgcataattcttccaaaggatcttattttgtgaactatatcagtagtgtacattaccatataatgtaaaaagatctacatacaaacaatgcaaccaactatccaagtgttataccaactaaaacccccaataaaccttgaacagtgactactttggttaattcattatattaagatataaagtcataaagctgctagttattatattaatttggaaatattaggctattcttgggcaaccctgcaacgattttttctaacagggatattattgactaatagcagaggatgtaatagtcaactgagttgtattggtaccacttccattgtaagtcccaaagtattatatatttgataataatgctaatcataattggaaagtaacattctatatgtaaatgtaaaatttatttgccaactgaatataggcaatgatagtgtgtcactatagggaacacagatttttgagatcttgtcctctggaagctggtaacaattaaaaacaatcttaaggcagggaaaaaaaaaaaaaaaaaa

SEQ ID NO: 2 - DNA, 2052 bp, Homo sapiens
ttttttttttttttttttccctgccttaagattgtttttaattgttaccagcttccagaggacaagatctcaaaaatctgtgttccctatagtgacacactatcattgcctatattcagttggcaaataaattttacatttacatatagaatgttactttccaattatgattagcattattatcaaatatataatactttgggacttacaatggaagtggtaccaatacaactcagttgactattacatcctctgctattagtcaataatatccctgttagaaaaaatcgttgcagggttgcccaagaatagcctaatatttccaaattaatataataactagcagctttatgactttatatcttaatataatgaattaaccaaagtagtcactgttcaaggtttattgggggttttagttggtataacacttggatagttggttgcattgtttgtatgtagatctttttacattatatggtaatgtacactactgatatagttcacaaaataagatcctttggaagaattatgcacaagacatgatattggatttatacactggatcccaggatgtgactcactgggaaaaaatgttggactaggcatgttcagtgaaggagccaggaagttatataacacacggtaaacatccacctggctcaaggggcaaatgcagtacgtacagcattggcagtggtgcgtcagaggtggcagaactatttcacactaaccagttgaagactacacaagattaataccatccagcatcaggatatagctgtggattttacaaaccattcttatttctaacttcaggagttgatgtttttcccagtccatcttaaaatattactgctttaatcacagatcagataaaaaggacaacatgcacaacctccacctagaatcctgttgtagcctagacagtgaaatgatatgacatcagaagactttaaaattgcagctccttttggatcccccaaagtgtatctgcactcttcttcaaacgggcctcttcctcagaagtcagagtcaccttcacaaggtctgagattccattctgtcccaaaatgcaaggaacactaaggaagacatcatcctttattccgtaaagacccttaatcatggtggaaactgggtgcacccgcctaagattcttcattatactctctgccaaatctgctacagagagtccaatagcccaggatgtgtagcctttgagtttgatcacctcataagcactctcaaccacctgcttgtgaacctctttccactgttccttatctttatcagtccctaaatctgggtgcagagtcttcagagagacaccagcaacattcattccactccatacaggcacactggaatctccatgttccccaaggacccacccatgacagcttaatgggtgaactcccagcctttcccccattaggtaacggaatcgggctgaatccagattgcaaccgcttccaataacacggtttttgggaaaaccacttatcttccaagccacgtaggtcaagatatccactttgccagagacaatctttggtgttctaaggaaaaggctgccatgttggagatccatcatctctcccttcaatttgtcttcgatgacatcaacaagagcaagttcatctgccaagtccttcattaagatactgatggcacaggccatgccaacagcaccaaccccaacaactgtaatcttattctggggggtctgttcttcctttagaagattataaatcagctgatcctttagagttgccatattggacttggaaccaaaaggaatcgggaatgcacgtcgggcggtcgtcgggggcgcgtggcaatgagatccggaatcggcggcagcggctgcagcactctgagctgggcgcgggaggggccttaagtggaacagctatgctgacgtcagcggggggggccggcggacgtgcgggaacccacgtgtgagtcgggctgggggtggatgccgagccaggcggggcactggagaggcccgggtggcgcgcgcagccagacaaccgaccggcagac

SEQ ID NO: 3 - DNA, 2323 bp, Homo sapiens
ttgggcggggcgtaaaagccgggcgttcggaggacccagcaattagtctgatttccgcccacctttccgagcgggaaggagagccacaaagcgcgcatgcgcgcggatcaccgcaggctcctgtgccttgggcttgagctttgtggcagttaatggcttttctgcacgtatctctggtgtttacttgagaagcctggctgtgtccttgctgtaggagccggagtagctcagagtgatcttgtctgaggaaaggccagccccacttggggttaataaaccgcgatgggtgaaccctcaggaggctatacttacacccaaacgtcgatattccttttccacgctaagattccttttggttccaagtccaatatggcaactctaaaggatcagctgatttataatcttctaaaggaagaacagaccccccagaataagattacagttgttggggttggtgctgttggcatggcctgtgccatcagtatcttaatgaaggacttggcagatgaacttgctcttgttgatgtcatcgaagacaaattgaagggagagatgatggatctccaacatggcagccttttccttagaacaccaaagattgtctctggcaaagactataatgtaactgcaaactccaagctggtcattatcacggctggggcacgtcagcaagagggagaaagccgtcttaatttggtccagcgtaacgtgaacatctttaaattcatcattcctaatgttgtaaaatacagcccgaactgcaagttgcttattgtttcaaatccagtggatatcttgacctacgtggcttggaagataagtggttttcccaaaaaccgtgttattggaagcggttgcaatctggattcagcccgattccgttacctaatgggggaaaggctgggagttcacccattaagctgtcatgggtgggtccttggggaacatggagattccagtgtgcctgtatggagtggaatgaatgttgctggtgtctctctgaagactctgcacccagatttagggactgataaagataaggaacagtggaaagaggttcacaagcaggtggttgagagtgcttatgaggtgatcaaactcaaaggctacacatcctgggctattggactctctgtagcagatttggcagagagtataatgaagaatcttaggcgggtgcacccagtttccaccatgattaagggtctttacggaataaaggatgatgtcttccttagtgttccttgcattttgggacagaatggaatctcagaccttgtgaaggtgactctgacttctgaggaagaggcccgtttgaagaagagtgcagatacactttgggggatccaaaaggagctgcaattttaaagtcttctgatgtcatatcatttcactgtctaggctacaacaggattctaggtggaggttgtgcatgttgtcctttttatctgatctgtgattaaagcagtaatattttaagatggactgggaaaaacatcaactcctgaagttagaaataagaatggtttgtaaaatccacagctatatcctgatgctggatggtattaatcttgtgtagtcttcaactggttagtgtgaaatagttctgccacctctgacgcaccactgccaatgctgtacgtactgcatttgccccttgagccaggtggatgtttaccgtgtgttatataacttcctggctccttcactgaacatgcctagtccaacattttttcccagtgagtcacatcctgggatccagtgtataaatccaatatcatgtcttgtgcataattcttccaaaggatcttattttgtgaactatatcagtagtgtacattaccatataatgtaaaaagatctacatacaaacaatgcaaccaactatccaagtgttataccaactaaaacccccaataaaccttgaacagtgactactttggttaattcattatattaagatataaagtcataaagctgctagttattatattaatttggaaatattaggctattcttgggcaaccctgcaacgattttttctaacagggatattattgactaatagcagaggatgtaatagtcaactgagttgtattggtaccacttccattgtaagtcccaaagtattatatatttgataataatgctaatcataattggaaagtaacattctatatgtaaatgtaaaatttatttgccaactgaatataggcaatgatagtgtgtcactatagggaacacagatttttgagatcttgtcctctggaagctggtaacaattaaaaacaatcttaaggcagggaaaaaaaaaaaaaaaaaa

SEQ ID NO: 4 - DNA, 2323 bp, Homo sapiens
ttttttttttttttttttccctgccttaagattgtttttaattgttaccagcttccagaggacaagatctcaaaaatctgtgttccctatagtgacacactatcattgcctatattcagttggcaaataaattttacatttacatatagaatgttactttccaattatgattagcattattatcaaatatataatactttgggacttacaatggaagtggtaccaatacaactcagttgactattacatcctctgctattagtcaataatatccctgttagaaaaaatcgttgcagggttgcccaagaatagcctaatatttccaaattaatataataactagcagctttatgactttatatcttaatataatgaattaaccaaagtagtcactgttcaaggtttattgggggttttagttggtataacacttggatagttggttgcattgtttgtatgtagatctttttacattatatggtaatgtacactactgatatagttcacaaaataagatcctttggaagaattatgcacaagacatgatattggatttatacactggatcccaggatgtgactcactgggaaaaaatgttggactaggcatgttcagtgaaggagccaggaagttatataacacacggtaaacatccacctggctcaaggggcaaatgcagtacgtacagcattggcagtggtgcgtcagaggtggcagaactatttcacactaaccagttgaagactacacaagattaataccatccagcatcaggatatagctgtggattttacaaaccattcttatttctaacttcaggagttgatgtttttcccagtccatcttaaaatattactgctttaatcacagatcagataaaaaggacaacatgcacaacctccacctagaatcctgttgtagcctagacagtgaaatgatatgacatcagaagactttaaaattgcagctccttttggatcccccaaagtgtatctgcactcttcttcaaacgggcctcttcctcagaagtcagagtcaccttcacaaggtctgagattccattctgtcccaaaatgcaaggaacactaaggaagacatcatcctttattccgtaaagacccttaatcatggtggaaactgggtgcacccgcctaagattcttcattatactctctgccaaatctgctacagagagtccaatagcccaggatgtgtagcctttgagtttgatcacctcataagcactctcaaccacctgcttgtgaacctctttccactgttccttatctttatcagtccctaaatctgggtgcagagtcttcagagagacaccagcaacattcattccactccatacaggcacactggaatctccatgttccccaaggacccacccatgacagcttaatgggtgaactcccagcctttcccccattaggtaacggaatcgggctgaatccagattgcaaccgcttccaataacacggtttttgggaaaaccacttatcttccaagccacgtaggtcaagatatccactggatttgaaacaataagcaacttgcagttcgggctgtattttacaacattaggaatgatgaatttaaagatgttcacgttacgctggaccaaattaagacggctttctccctcttgctgacgtgccccagccgtgataatgaccagcttggagtttgcagttacattatagtctttgccagagacaatctttggtgttctaaggaaaaggctgccatgttggagatccatcatctctcccttcaatttgtcttcgatgacatcaacaagagcaagttcatctgccaagtccttcattaagatactgatggcacaggccatgccaacagcaccaaccccaacaactgtaatcttattctggggggtctgttcttcctttagaagattataaatcagctgatcctttagagttgccatattggacttggaaccaaaaggaatcttagcgtggaaaaggaatatcgacgtttgggtgtaagtatagcctcctgagggttcacccatcgcggtttattaaccccaagtggggctggcctttcctcagacaagatcactctgagctactccggctcctacagcaaggacacagccaggcttctcaagtaaacaccagagatacgtgcagaaaagccattaactgccacaaagctcaagcccaaggcacaggagcctgcggtgatccgcgcgcatgcgcgctttgtggctctccttcccgctcggaaaggtgggcggaaatcagactaattgctgggtcctccgaacgcccggcttttacgccccgcccaa

SEQ ID NO: 5 - DNA, 1957 bp, Homo sapiens
gtctgccggtcggttgtctggctgcgcgcgccacccgggcctctccagtgccccgcctggctcggcatccacccccagcccgactcacacgtgggttcccgcacgtccgccggccccccccgctgacgtcagcatagctgttccacttaaggcccctcccgcgcccagctcagagtgctgcagccgctgccgccgattccggatctcattgccacgcgcccccgacgaccgcccgacgtgcattcccgattccttttggttccaagtccaatatggcaactctaaaggatcagctgatttataatcttctaaaggaagaacagaccccccagaataagattacagttgttggggttggtgctgttggcatggcctgtgccatcagtatcttaatgaaggacttggcagatgaacttgctcttgttgatgtcatcgaagacaaattgaagggagagatgatggatctccaacatggcagccttttccttagaacaccaaagattgtctctggcaaagactataatgtaactgcaaactccaagctggtcattatcacggctggggcacgtcagcaagagggagaaagccgtcttaatttggtccagcgtaacgtgaacatctttaaattcatcattcctaatgttgtaaaatacagcccgaactgcaagttgcttattgtttcaaatccagtggatatcttgacctacgtggcttggaagataagtggttttcccaaaaaccgtgttattggaagcggttgcaatctggattcagcccgattccgttacctaatgggggaaaggctgggagttcacccattaagctgtcatgggtgggtccttggggaacatggagattccagtgtgcctgtatggagtggaatgaatgttgctggtgtctctctgaagactctgcacccagatttagggactgataaagataaggaacagtggaaagagtgcagatacactttgggggatccaaaaggagctgcaattttaaagtcttctgatgtcatatcatttcactgtctaggctacaacaggattctaggtggaggttgtgcatgttgtcctttttatctgatctgtgattaaagcagtaatattttaagatggactgggaaaaacatcaactcctgaagttagaaataagaatggtttgtaaaatccacagctatatcctgatgctggatggtattaatcttgtgtagtcttcaactggttagtgtgaaatagttctgccacctctgacgcaccactgccaatgctgtacgtactgcatttgccccttgagccaggtggatgtttaccgtgtgttatataacttcctggctccttcactgaacatgcctagtccaacattttttcccagtgagtcacatcctgggatccagtgtataaatccaatatcatgtcttgtgcataattcttccaaaggatcttattttgtgaactatatcagtagtgtacattaccatataatgtaaaaagatctacatacaaacaatgcaaccaactatccaagtgttataccaactaaaacccccaataaaccttgaacagtgactactttggttaattcattatattaagatataaagtcataaagctgctagttattatattaatttggaaatattaggctattcttgggcaaccctgcaacgattttttctaacagggatattattgactaatagcagaggatgtaatagtcaactgagttgtattggtaccacttccattgtaagtcccaaagtattatatatttgataataatgctaatcataattggaaagtaacattctatatgtaaatgtaaaatttatttgccaactgaatataggcaatgatagtgtgtcactatagggaacacagatttttgagatcttgtcctctggaagctggtaacaattaaaaacaatcttaaggcagggaaaaaaaaaaaaaaaaaa

SEQ ID NO: 6 - DNA, 1957 bp, Homo sapiens
ttttttttttttttttttccctgccttaagattgtttttaattgttaccagcttccagaggacaagatctcaaaaatctgtgttccctatagtgacacactatcattgcctatattcagttggcaaataaattttacatttacatatagaatgttactttccaattatgattagcattattatcaaatatataatactttgggacttacaatggaagtggtaccaatacaactcagttgactattacatcctctgctattagtcaataatatccctgttagaaaaaatcgttgcagggttgcccaagaatagcctaatatttccaaattaatataataactagcagctttatgactttatatcttaatataatgaattaaccaaagtagtcactgttcaaggtttattgggggttttagttggtataacacttggatagttggttgcattgtttgtatgtagatctttttacattatatggtaatgtacactactgatatagttcacaaaataagatcctttggaagaattatgcacaagacatgatattggatttatacactggatcccaggatgtgactcactgggaaaaaatgttggactaggcatgttcagtgaaggagccaggaagttatataacacacggtaaacatccacctggctcaaggggcaaatgcagtacgtacagcattggcagtggtgcgtcagaggtggcagaactatttcacactaaccagttgaagactacacaagattaataccatccagcatcaggatatagctgtggattttacaaaccattcttatttctaacttcaggagttgatgtttttcccagtccatcttaaaatattactgctttaatcacagatcagataaaaaggacaacatgcacaacctccacctagaatcctgttgtagcctagacagtgaaatgatatgacatcagaagactttaaaattgcagctccttttggatcccccaaagtgtatctgcactctttccactgttccttatctttatcagtccctaaatctgggtgcagagtcttcagagagacaccagcaacattcattccactccatacaggcacactggaatctccatgttccccaaggacccacccatgacagcttaatgggtgaactcccagcctttcccccattaggtaacggaatcgggctgaatccagattgcaaccgcttccaataacacggtttttgggaaaaccacttatcttccaagccacgtaggtcaagatatccactggatttgaaacaataagcaacttgcagttcgggctgtattttacaacattaggaatgatgaatttaaagatgttcacgttacgctggaccaaattaagacggctttctccctcttgctgacgtgccccagccgtgataatgaccagcttggagtttgcagttacattatagtctttgccagagacaatctttggtgttctaaggaaaaggctgccatgttggagatccatcatctctcccttcaatttgtcttcgatgacatcaacaagagcaagttcatctgccaagtccttcattaagatactgatggcacaggccatgccaacagcaccaaccccaacaactgtaatcttattctggggggtctgttcttcctttagaagattataaatcagctgatcctttagagttgccatattggacttggaaccaaaaggaatcgggaatgcacgtcgggcggtcgtcgggggcgcgtggcaatgagatccggaatcggcggcagcggctgcagcactctgagctgggcgcgggaggggccttaagtggaacagctatgctgacgtcagcggggggggccggcggacgtgcgggaacccacgtgtgagtcgggctgggggtggatgccgagccaggcggggcactggagaggcccgggtggcgcgcgcagccagacaaccgaccggcagac

SEQ ID NO: 7 - DNA, 2102 bp, Homo sapiens
gtctgccggtcggttgtctggctgcgcgcgccacccgggcctctccagtgccccgcctggctcggcatccacccccagcccgactcacacgtgggttcccgcacgtccgccggccccccccgctgacgtcagcatagctgttccacttaaggcccctcccgcgcccagctcagagtgctgcagccgctgccgccgattccggatctcattgccacgcgcccccgacgaccgcccgacgtgcattcccgattccttttggttccaagtccaatatggcaactctaaaggatcagctgatttataatcttctaaaggaagaacagaccccccagaataagattacagttgttggggttggtgctgttggcatggcctgtgccatcagtatcttaatgaaggacttggcagatgaacttgctcttgttgatgtcatcgaagacaaattgaagggagagatgatggatctccaacatggcagccttttccttagaacaccaaagattgtctctggcaaagactataatgtaactgcaaactccaagctggtcattatcacggctggggcacgtcagcaagagggagaaagccgtcttaatttggtccagcgtaacgtgaacatctttaaattcatcattcctaatgttgtaaaatacagcccgaactgcaagttgcttattgtttcaaatccagtggatatcttgacctacgtggcttggaagataagtggttttcccaaaaaccgtgttattggaagcggttgcaatctggattcagcccgattccgttacctaatgggggaaaggctgggagttcacccattaagctgtcatgggtgggtccttggggaacatggagattccagtgtgcctgtatggagtggaatgaatgttgctggtgtctctctgaagactctgcacccagatttagggactgataaagataaggaacagtggaaagaggttcacaagcaggtggttgagagggtctttacggaataaaggatgatgtcttccttagtgttccttgcattttgggacagaatggaatctcagaccttgtgaaggtgactctgacttctgaggaagaggcccgtttgaagaagagtgcagatacactttgggggatccaaaaggagctgcaattttaaagtcttctgatgtcatatcatttcactgtctaggctacaacaggattctaggtggaggttgtgcatgttgtcctttttatctgatctgtgattaaagcagtaatattttaagatggactgggaaaaacatcaactcctgaagttagaaataagaatggtttgtaaaatccacagctatatcctgatgctggatggtattaatcttgtgtagtcttcaactggttagtgtgaaatagttctgccacctctgacgcaccactgccaatgctgtacgtactgcatttgccccttgagccaggtggatgtttaccgtgtgttatataacttcctggctccttcactgaacatgcctagtccaacattttttcccagtgagtcacatcctgggatccagtgtataaatccaatatcatgtcttgtgcataattcttccaaaggatcttattttgtgaactatatcagtagtgtacattaccatataatgtaaaaagatctacatacaaacaatgcaaccaactatccaagtgttataccaactaaaacccccaataaaccttgaacagtgactactttggttaattcattatattaagatataaagtcataaagctgctagttattatattaatttggaaatattaggctattcttgggcaaccctgcaacgattttttctaacagggatattattgactaatagcagaggatgtaatagtcaactgagttgtattggtaccacttccattgtaagtcccaaagtattatatatttgataataatgctaatcataattggaaagtaacattctatatgtaaatgtaaaatttatttgccaactgaatataggcaatgatagtgtgtcactatagggaacacagatttttgagatcttgtcctctggaagctggtaacaattaaaaacaatcttaaggcagggaaaaaaaaaaaaaaaaaa

SEQ ID NO: 8 - DNA, 2102 bp, Homo sapiens
ttttttttttttttttttccctgccttaagattgtttttaattgttaccagcttccagaggacaagatctcaaaaatctgtgttccctatagtgacacactatcattgcctatattcagttggcaaataaattttacatttacatatagaatgttactttccaattatgattagcattattatcaaatatataatactttgggacttacaatggaagtggtaccaatacaactcagttgactattacatcctctgctattagtcaataatatccctgttagaaaaaatcgttgcagggttgcccaagaatagcctaatatttccaaattaatataataactagcagctttatgactttatatcttaatataatgaattaaccaaagtagtcactgttcaaggtttattgggggttttagttggtataacacttggatagttggttgcattgtttgtatgtagatctttttacattatatggtaatgtacactactgatatagttcacaaaataagatcctttggaagaattatgcacaagacatgatattggatttatacactggatcccaggatgtgactcactgggaaaaaatgttggactaggcatgttcagtgaaggagccaggaagttatataacacacggtaaacatccacctggctcaaggggcaaatgcagtacgtacagcattggcagtggtgcgtcagaggtggcagaactatttcacactaaccagttgaagactacacaagattaataccatccagcatcaggatatagctgtggattttacaaaccattcttatttctaacttcaggagttgatgtttttcccagtccatcttaaaatattactgctttaatcacagatcagataaaaaggacaacatgcacaacctccacctagaatcctgttgtagcctagacagtgaaatgatatgacatcagaagactttaaaattgcagctccttttggatcccccaaagtgtatctgcactcttcttcaaacgggcctcttcctcagaagtcagagtcaccttcacaaggtctgagattccattctgtcccaaaatgcaaggaacactaaggaagacatcatcctttattccgtaaagaccctctcaaccacctgcttgtgaacctctttccactgttccttatctttatcagtccctaaatctgggtgcagagtcttcagagagacaccagcaacattcattccactccatacaggcacactggaatctccatgttccccaaggacccacccatgacagcttaatgggtgaactcccagcctttcccccattaggtaacggaatcgggctgaatccagattgcaaccgcttccaataacacggtttttgggaaaaccacttatcttccaagccacgtaggtcaagatatccactggatttgaaacaataagcaacttgcagttcgggctgtattttacaacattaggaatgatgaatttaaagatgttcacgttacgctggaccaaattaagacggctttctccctcttgctgacgtgccccagccgtgataatgaccagcttggagtttgcagttacattatagtctttgccagagacaatctttggtgttctaaggaaaaggctgccatgttggagatccatcatctctcccttcaatttgtcttcgatgacatcaacaagagcaagttcatctgccaagtccttcattaagatactgatggcacaggccatgccaacagcaccaaccccaacaactgtaatcttattctggggggtctgttcttcctttagaagattataaatcagctgatcctttagagttgccatattggacttggaaccaaaaggaatcgggaatgcacgtcgggcggtcgtcgggggcgcgtggcaatgagatccggaatcggcggcagcggctgcagcactctgagctgggcgcgggaggggccttaagtggaacagctatgctgacgtcagcggggggggccggcggacgtgcgggaacccacgtgtgagtcgggctgggggtggatgccgagccaggcggggcactggagaggcccgggtggcgcgcgcagccagacaaccgaccggcagac

SEQ ID NO: 9 - DNA, 2226 bp, Homo sapiens
gtctgccggtcggttgtctggctgcgcgcgccacccgggcctctccagtgccccgcctggctcggcatccacccccagcccgactcacacgtgggttcccgcacgtccgccggccccccccgctgacgtcagcatagctgttccacttaaggcccctcccgcgcccagctcagagtgctgcagccgctgccgccgattccggatctcattgccacgcgcccccgacgaccgcccgacgtgcattcccgattccttttggttccaagtccaatatggcaactctaaaggatcagctgatttataatcttctaaaggaagaacagaccccccagaataagattacagttgttggggttggtgctgttggcatggcctgtgccatcagtatcttaatgaaggacttggcagatgaacttgctcttgttgatgtcatcgaagacaaattgaagggagagatgatggatctccaacatggcagccttttccttagaacaccaaagattgtctctggcaaagactataatgtaactgcaaactccaagctggtcattatcacggctggggcacgtcagcaagagggagaaagccgtcttaatttggtccagcgtaacgtgaacatctttaaattcatcattcctaatgttgtaaaatacagcccgaactgcaagttgcttattgtttcaaatccagtggatatcttgacctacgtggcttggaagataagtggttttcccaaaaaccgtgttattggaagcggttgcaatctggattcagcccgattccgttacctaatgggggaaaggctgggagttcacccattaagctgtcatgggtgggtccttggggaacatggagattccagtgtgcctgtatggagtggaatgaatgttgctggtgtctctctgaagactctgcacccagatttagggactgataaagataaggaacagtggaaagaggttcacaagcaggtggttgagagtgcttatgaggtgatcaaactcaaaggctacacatcctgggctattggactctctgtagcagatttggcagagagtataatgaagaatcttaggcgggtgcacccagtttccaccatgattaagggtctttacggaataaaggatgatgtcttccttagtgttccttgcattttgggacagaatggaatctcagaccttgtgaaggtgactctgacttctgaggaagaggcccgtttgaagaagagtgcagatacactttgggggatccaaaaggagctgcaattttaaagtcttctgatgtcatatcatttcactgtctaggctacaacaggattctaggtggaggttgtgcatgttgtcctttttatctgatctgtgattaaagcagtaatattttaagatggactgggaaaaacatcaactcctgaagttagaaataagaatggtttgtaaaatccacagctatatcctgatgctggatggtattaatcttgtgtagtcttcaactggttagtgtgaaatagttctgccacctctgacgcaccactgccaatgctgtacgtactgcatttgccccttgagccaggtggatgtttaccgtgtgttatataacttcctggctccttcactgaacatgcctagtccaacattttttcccagtgagtcacatcctgggatccagtgtataaatccaatatcatgtcttgtgcataattcttccaaaggatcttattttgtgaactatatcagtagtgtacattaccatataatgtaaaaagatctacatacaaacaatgcaaccaactatccaagtgttataccaactaaaacccccaataaaccttgaacagtgactactttggttaattcattatattaagatataaagtcataaagctgctagttattatattaatttggaaatattaggctattcttgggcaaccctgcaacgattttttctaacagggatattattgactaatagcagaggatgtaatagtcaactgagttgtattggtaccacttccattgtaagtcccaaagtattatatatttgataataatgctaatcataattggaaagtaacattctatatgtaaatgtaaaatttatttgccaactgaatataggcaatgatagtgtgtcactatagggaacacagatttttgagatcttgtcctctggaagctggtaacaattaaaaacaatcttaaggcagggaaaaaaaaaaaaaaaaaa

SEQ ID NO: 10 - DNA, 2226 bp, Homo sapiens
ttttttttttttttttttccctgccttaagattgtttttaattgttaccagcttccagaggacaagatctcaaaaatctgtgttccctatagtgacacactatcattgcctatattcagttggcaaataaattttacatttacatatagaatgttactttccaattatgattagcattattatcaaatatataatactttgggacttacaatggaagtggtaccaatacaactcagttgactattacatcctctgctattagtcaataatatccctgttagaaaaaatcgttgcagggttgcccaagaatagcctaatatttccaaattaatataataactagcagctttatgactttatatcttaatataatgaattaaccaaagtagtcactgttcaaggtttattgggggttttagttggtataacacttggatagttggttgcattgtttgtatgtagatctttttacattatatggtaatgtacactactgatatagttcacaaaataagatcctttggaagaattatgcacaagacatgatattggatttatacactggatcccaggatgtgactcactgggaaaaaatgttggactaggcatgttcagtgaaggagccaggaagttatataacacacggtaaacatccacctggctcaaggggcaaatgcagtacgtacagcattggcagtggtgcgtcagaggtggcagaactatttcacactaaccagttgaagactacacaagattaataccatccagcatcaggatatagctgtggattttacaaaccattcttatttctaacttcaggagttgatgtttttcccagtccatcttaaaatattactgctttaatcacagatcagataaaaaggacaacatgcacaacctccacctagaatcctgttgtagcctagacagtgaaatgatatgacatcagaagactttaaaattgcagctccttttggatcccccaaagtgtatctgcactcttcttcaaacgggcctcttcctcagaagtcagagtcaccttcacaaggtctgagattccattctgtcccaaaatgcaaggaacactaaggaagacatcatcctttattccgtaaagacccttaatcatggtggaaactgggtgcacccgcctaagattcttcattatactctctgccaaatctgctacagagagtccaatagcccaggatgtgtagcctttgagtttgatcacctcataagcactctcaaccacctgcttgtgaacctctttccactgttccttatctttatcagtccctaaatctgggtgcagagtcttcagagagacaccagcaacattcattccactccatacaggcacactggaatctccatgttccccaaggacccacccatgacagcttaatgggtgaactcccagcctttcccccattaggtaacggaatcgggctgaatccagattgcaaccgcttccaataacacggtttttgggaaaaccacttatcttccaagccacgtaggtcaagatatccactggatttgaaacaataagcaacttgcagttcgggctgtattttacaacattaggaatgatgaatttaaagatgttcacgttacgctggaccaaattaagacggctttctccctcttgctgacgtgccccagccgtgataatgaccagcttggagtttgcagttacattatagtctttgccagagacaatctttggtgttctaaggaaaaggctgccatgttggagatccatcatctctcccttcaatttgtcttcgatgacatcaacaagagcaagttcatctgccaagtccttcattaagatactgatggcacaggccatgccaacagcaccaaccccaacaactgtaatcttattctggggggtctgttcttcctttagaagattataaatcagctgatcctttagagttgccatattggacttggaaccaaaaggaatcgggaatgcacgtcgggcggtcgtcgggggcgcgtggcaatgagatccggaatcggcggcagcggctgcagcactctgagctgggcgcgggaggggccttaagtggaacagctatgctgacgtcagcggggggggccggcggacgtgcgggaacccacgtgtgagtcgggctgggggtggatgccgagccaggcggggcactggagaggcccgggtggcgcgcgcagccagacaaccgaccggcagac

SEQ ID NO: 11 - DNA, 1854 bp, Mus musculus
gggttcttgcgggggtgggggggttaggaaggaagcttgcgcgtgcgcaggcttaagcacgttgctatgccttggggtcgcaccttgtggccgttattggcgccctctgctcttgatttttggtacttcctggagcaacttggcgctctacttgctgtagggctctgggtgatgggagaagagcgggagggcagctttctaaccatataagaggagataccatccccttttggggttcatcaagatgagtaagtcctcaggcggctacacgtacacggagacctcggtattatttttccatttcaaggtctcaaaagattcaaagtccaagatggcaaccctcaaggaccagctgattgtgaatcttcttaaggaagagcaggctccccagaacaagattacagttgttggggttggtgctgttggcatggcttgtgccatcagtatcttaatgaaggacttggcggatgagcttgcccttgttgacgtcatggaagacaaactcaagggcgagatgatggatctccagcatggcagcctcttccttaaaacaccaaaaattgtctccagcaaagactactgtgtaactgcgaactccaagctggtcattatcaccgcgggggcccgtcagcaagagggggagagccggctcaacctggtccagcgaaacgtgaacatcttcaagttcatcattcccaacattgtcaagtacagtccacactgcaagctgctgatcgtctccaatccagtggatatcttgacctacgtggcttggaaaatcagtggctttcccaaaaaccgagtaattggaagtggttgcaatctggattcagcgcggttccgttacctgatgggagagaggctgggggttcacgcgctgagctgtcacggctgggtcctgggagaacatggcgactccagtgtgcctgtgtggagtggtgtgaatgttgccggcgtctccctgaagtctcttaacccagaactgggcactgacgcagacaaggagcagtggaaggaggttcacaagcaggtggtggacagtgcctacgaggtgatcaagctgaaaggttacacatcctgggccattggcctctctgtggcagacttggctgagagcataatgaagaaccttaggcgggtgcatcccatttccaccatgattaagggtctctatggaatcaatgaggatgtcttcctcagtgtcccatgtatcctgggacaaaatggaatctcggatgttgtgaaggtgacactgactcctgaggaagaggcccgcctgaagaagagcgcagacaccctctggggaatccagaaggagctgcagttctaaagtcttccccgtgtcctagcacttcactgtccaggctgcagcagggcttctaggcagaccacacccttctcgtctgagctgtggttagtacagtggtgttgagatggtgtggggaaacatctcactccccacagctctgccctgctgccaagtggtacttgtgtagtggtgacctggttagtgtgacagtcccactgtctctgagacacactgccaactgcaggcttcgattacccctgtgagcctgctgcattgctgccctgcaccaaacatgcctaggccgacgagttcccagttaagtcgtataacctggctccagtgtgtacgtccatgatgcatatcttgtgcataaatgttgtacaggatattttatatattatatgtgtctgtagtgtgcattgcaatattatgtgagatgtaagatctgcatatggatgatggaaccaaccacccaagtgtcatgccaaataaaaccttgaacagtgaaaaaaaaaaaaaaaaaaaaaaaaaaaaaaaaaaaaaaa

SEQ ID NO: 12 - DNA, 1854 bp, Mus musculus
tttttttttttttttttttttttttttttttttttttttcactgttcaaggttttatttggcatgacacttgggtggttggttccatcatccatatgcagatcttacatctcacataatattgcaatgcacactacagacacatataatatataaaatatcctgtacaacatttatgcacaagatatgcatcatggacgtacacactggagccaggttatacgacttaactgggaactcgtcggcctaggcatgtttggtgcagggcagcaatgcagcaggctcacaggggtaatcgaagcctgcagttggcagtgtgtctcagagacagtgggactgtcacactaaccaggtcaccactacacaagtaccacttggcagcagggcagagctgtggggagtgagatgtttccccacaccatctcaacaccactgtactaaccacagctcagacgagaagggtgtggtctgcctagaagccctgctgcagcctggacagtgaagtgctaggacacggggaagactttagaactgcagctccttctggattccccagagggtgtctgcgctcttcttcaggcgggcctcttcctcaggagtcagtgtcaccttcacaacatccgagattccattttgtcccaggatacatgggacactgaggaagacatcctcattgattccatagagacccttaatcatggtggaaatgggatgcacccgcctaaggttcttcattatgctctcagccaagtctgccacagagaggccaatggcccaggatgtgtaacctttcagcttgatcacctcgtaggcactgtccaccacctgcttgtgaacctccttccactgctccttgtctgcgtcagtgcccagttctgggttaagagacttcagggagacgccggcaacattcacaccactccacacaggcacactggagtcgccatgttctcccaggacccagccgtgacagctcagcgcgtgaacccccagcctctctcccatcaggtaacggaaccgcgctgaatccagattgcaaccacttccaattactcggtttttgggaaagccactgattttccaagccacgtaggtcaagatatccactggattggagacgatcagcagcttgcagtgtggactgtacttgacaatgttgggaatgatgaacttgaagatgttcacgtttcgctggaccaggttgagccggctctccccctcttgctgacgggcccccgcggtgataatgaccagcttggagttcgcagttacacagtagtctttgctggagacaatttttggtgttttaaggaagaggctgccatgctggagatccatcatctcgcccttgagtttgtcttccatgacgtcaacaagggcaagctcatccgccaagtccttcattaagatactgatggcacaagccatgccaacagcaccaaccccaacaactgtaatcttgttctggggagcctgctcttccttaagaagattcacaatcagctggtccttgagggttgccatcttggactttgaatcttttgagaccttgaaatggaaaaataataccgaggtctccgtgtacgtgtagccgcctgaggacttactcatcttgatgaaccccaaaaggggatggtatctcctcttatatggttagaaagctgccctcccgctcttctcccatcacccagagccctacagcaagtagagcgccaagttgctccaggaagtaccaaaaatcaagagcagagggcgccaataacggccacaaggtgcgaccccaaggcatagcaacgtgcttaagcctgcgcacgcgcaagcttccttcctaacccccccacccccgcaagaaccc

SEQ ID NO: 13 - DNA, 1661 bp, Mus musculus
ggagcttccatttaaggccccgcccgcgtgctgctctgcgtgctggagccactgtcgccgagctcgggccacgctgcttctcctcgccagtcgcccccccatcgtgcactagcggtctcaaaagattcaaagtccaagatggcaaccctcaaggaccagctgattgtgaatcttcttaaggaagagcaggctccccagaacaagattacagttgttggggttggtgctgttggcatggcttgtgccatcagtatcttaatgaaggacttggcggatgagcttgcccttgttgacgtcatggaagacaaactcaagggcgagatgatggatctccagcatggcagcctcttccttaaaacaccaaaaattgtctccagcaaagactactgtgtaactgcgaactccaagctggtcattatcaccgcgggggcccgtcagcaagagggggagagccggctcaacctggtccagcgaaacgtgaacatcttcaagttcatcattcccaacattgtcaagtacagtccacactgcaagctgctgatcgtctccaatccagtggatatcttgacctacgtggcttggaaaatcagtggctttcccaaaaaccgagtaattggaagtggttgcaatctggattcagcgcggttccgttacctgatgggagagaggctgggggttcacgcgctgagctgtcacggctgggtcctgggagaacatggcgactccagtgtgcctgtgtggagtggtgtgaatgttgccggcgtctccctgaagtctcttaacccagaactgggcactgacgcagacaaggagcagtggaaggaggttcacaagcaggtggtggacagtgcctacgaggtgatcaagctgaaaggttacacatcctgggccattggcctctctgtggcagacttggctgagagcataatgaagaaccttaggcgggtgcatcccatttccaccatgattaagggtctctatggaatcaatgaggatgtcttcctcagtgtcccatgtatcctgggacaaaatggaatctcggatgttgtgaaggtgacactgactcctgaggaagaggcccgcctgaagaagagcgcagacaccctctggggaatccagaaggagctgcagttctaaagtcttccccgtgtcctagcacttcactgtccaggctgcagcagggcttctaggcagaccacacccttctcgtctgagctgtggttagtacagtggtgttgagatggtgtggggaaacatctcactccccacagctctgccctgctgccaagtggtacttgtgtagtggtgacctggttagtgtgacagtcccactgtctctgagacacactgccaactgcaggcttcgattacccctgtgagcctgctgcattgctgccctgcaccaaacatgcctaggccgacgagttcccagttaagtcgtataacctggctccagtgtgtacgtccatgatgcatatcttgtgcataaatgttgtacaggatattttatatattatatgtgtctgtagtgtgcattgcaatattatgtgagatgtaagatctgcatatggatgatggaaccaaccacccaagtgtcatgccaaataaaaccttgaacagtgaaaaaaaaaaaaaaaaaaaaaaaaaaaaaaaaaaaaaaa

SEQ ID NO: 14 - DNA, 1661 bp, Mus musculus
tttttttttttttttttttttttttttttttttttttttcactgttcaaggttttatttggcatgacacttgggtggttggttccatcatccatatgcagatcttacatctcacataatattgcaatgcacactacagacacatataatatataaaatatcctgtacaacatttatgcacaagatatgcatcatggacgtacacactggagccaggttatacgacttaactgggaactcgtcggcctaggcatgtttggtgcagggcagcaatgcagcaggctcacaggggtaatcgaagcctgcagttggcagtgtgtctcagagacagtgggactgtcacactaaccaggtcaccactacacaagtaccacttggcagcagggcagagctgtggggagtgagatgtttccccacaccatctcaacaccactgtactaaccacagctcagacgagaagggtgtggtctgcctagaagccctgctgcagcctggacagtgaagtgctaggacacggggaagactttagaactgcagctccttctggattccccagagggtgtctgcgctcttcttcaggcgggcctcttcctcaggagtcagtgtcaccttcacaacatccgagattccattttgtcccaggatacatgggacactgaggaagacatcctcattgattccatagagacccttaatcatggtggaaatgggatgcacccgcctaaggttcttcattatgctctcagccaagtctgccacagagaggccaatggcccaggatgtgtaacctttcagcttgatcacctcgtaggcactgtccaccacctgcttgtgaacctccttccactgctccttgtctgcgtcagtgcccagttctgggttaagagacttcagggagacgccggcaacattcacaccactccacacaggcacactggagtcgccatgttctcccaggacccagccgtgacagctcagcgcgtgaacccccagcctctctcccatcaggtaacggaaccgcgctgaatccagattgcaaccacttccaattactcggtttttgggaaagccactgattttccaagccacgtaggtcaagatatccactggattggagacgatcagcagcttgcagtgtggactgtacttgacaatgttgggaatgatgaacttgaagatgttcacgtttcgctggaccaggttgagccggctctccccctcttgctgacgggcccccgcggtgataatgaccagcttggagttcgcagttacacagtagtctttgctggagacaatttttggtgttttaaggaagaggctgccatgctggagatccatcatctcgcccttgagtttgtcttccatgacgtcaacaagggcaagctcatccgccaagtccttcattaagatactgatggcacaagccatgccaacagcaccaaccccaacaactgtaatcttgttctggggagcctgctcttccttaagaagattcacaatcagctggtccttgagggttgccatcttggactttgaatcttttgagaccgctagtgcacgatgggggggcgactggcgaggagaagcagcgtggcccgagctcggcgacagtggctccagcacgcagagcagcacgcgggcggggccttaaatggaagctcc

SEQ ID NO: 15 - DNA, 1609 bp, Rattus norvegicus
gtgtgctggagccactgtcgccgatctcgcgcacgctactgctgctgctcgcccgtcgtcccccatcgtgcactaagcggtcccaaaagattcaaagtccaagatggcagccctcaaggaccagctgattgtgaatcttcttaaggaagaacaggtcccccagaacaagattacagttgttggggttggtgctgttggcatggcttgtgccatcagtatcttaatgaaggacttggctgatgagcttgcccttgttgatgtcatagaagataagctaaagggagagatgatggatcttcagcatggcagccttttccttaagacaccaaaaattgtctccagcaaagattatagtgtgactgcaaactccaagctggtcattatcaccgcgggggcccgtcagcaagagggagagagccggctcaatttggtccagcgaaacgtgaacatcttcaagttcatcattccaaatgttgtgaaatacagtccacagtgcaaactgctcatcgtctcaaacccagtggatatcttgacctacgtggcttggaagatcagcggcttccccaaaaacagagttattggaagtggttgcaatctggattcggctcggttccgttacctgatgggagaaaggctgggagttcatccactgagctgtcacgggtgggtcctgggagagcatggcgactccagtgtgcctgtgtggagtggtgtgaacgtcgccggcgtctccctgaagtctctgaacccgcagctgggcacggatgcagacaaggagcagtggaaggatgtgcacaagcaggtggttgacagtgcatacgaagtgatcaagctgaaaggttacacatcctgggccattggcctctccgtggcagacttggccgagagcataatgaagaaccttaggcgggtgcatcccatttccaccatgattaagggtctctatggaatcaaggaggatgtcttcctcagcgtcccatgtatcctgggacaaaatggaatctcagatgttgtgaaggtgacactgactcctgacgaggaggcccgcctgaagaagagtgcagataccctctggggaatccagaaggagctgcagttctaaagtcttcccagtgtcctagcacttcactgtccaggctgcagcagggtttctatggagaccacgcacttctcatctgagctgtggttagtccagttggtccagttgtgttgaggtggtctgggggaaatctcagttccacagctctaccctgctaagtggtacttgtgtagtggtaacctggttagtgtgacaatcccactgtctccaagacacactgccaactgcatgcaggctttgattaccctgtgagcctgctgcattgctgtgctacgcaccctcaccaaacatgcctaggccatgagttcccagttagttataagctggctccagtgtgtaagtccatcgtgtatatcttgtgcataaatgttctacaggatattttctgtattatatgtgtctgtagtgtacattgcaatattacgtgaaatgtaagatctgcatatggatgatggaaccaaccactcaagtgtcatgccaaggaaaacaccaaataaaccttgaacagtg

SEQ ID NO: 16 - DNA, 1609 bp, Rattus norvegicus
cactgttcaaggtttatttggtgttttccttggcatgacacttgagtggttggttccatcatccatatgcagatcttacatttcacgtaatattgcaatgtacactacagacacatataatacagaaaatatcctgtagaacatttatgcacaagatatacacgatggacttacacactggagccagcttataactaactgggaactcatggcctaggcatgtttggtgagggtgcgtagcacagcaatgcagcaggctcacagggtaatcaaagcctgcatgcagttggcagtgtgtcttggagacagtgggattgtcacactaaccaggttaccactacacaagtaccacttagcagggtagagctgtggaactgagatttcccccagaccacctcaacacaactggaccaactggactaaccacagctcagatgagaagtgcgtggtctccatagaaaccctgctgcagcctggacagtgaagtgctaggacactgggaagactttagaactgcagctccttctggattccccagagggtatctgcactcttcttcaggcgggcctcctcgtcaggagtcagtgtcaccttcacaacatctgagattccattttgtcccaggatacatgggacgctgaggaagacatcctccttgattccatagagacccttaatcatggtggaaatgggatgcacccgcctaaggttcttcattatgctctcggccaagtctgccacggagaggccaatggcccaggatgtgtaacctttcagcttgatcacttcgtatgcactgtcaaccacctgcttgtgcacatccttccactgctccttgtctgcatccgtgcccagctgcgggttcagagacttcagggagacgccggcgacgttcacaccactccacacaggcacactggagtcgccatgctctcccaggacccacccgtgacagctcagtggatgaactcccagcctttctcccatcaggtaacggaaccgagccgaatccagattgcaaccacttccaataactctgtttttggggaagccgctgatcttccaagccacgtaggtcaagatatccactgggtttgagacgatgagcagtttgcactgtggactgtatttcacaacatttggaatgatgaacttgaagatgttcacgtttcgctggaccaaattgagccggctctctccctcttgctgacgggcccccgcggtgataatgaccagcttggagtttgcagtcacactataatctttgctggagacaatttttggtgtcttaaggaaaaggctgccatgctgaagatccatcatctctccctttagcttatcttctatgacatcaacaagggcaagctcatcagccaagtccttcattaagatactgatggcacaagccatgccaacagcaccaaccccaacaactgtaatcttgttctgggggacctgttcttccttaagaagattcacaatcagctggtccttgagggctgccatcttggactttgaatcttttgggaccgcttagtgcacgatgggggacgacgggcgagcagcagcagtagcgtgcgcgagatcggcgacagtggctccagcacac

SEQ ID NO: 17 - DNA, 1919 bp, Macaca mulatta
gggcgtaaaagcagggcggtctgaagccgcagctattagtctgatttccgcccacctttccgagcgaggagaaccacaaagcgcgcatgcgcgcggatcaccgcccgcttcagtgccttgggctcgagctttgtggcagttagtggcttttctgcacatacctctggtttttacttgaagcctggctgtgtccttgctgtaggagcaggagtggctcaaagtgatcttgtctgaggaaaggccagccccacttggggttaataaaccgcgatgggtgagccctcaggaggctatacttacacccaaacgtcgatattccttttccacgctaagattccttttggttccaagtccaatatggcaactctcaaggatcagctgattcataatcttctaaaggaagaacagactccccagaataagattacagttgttggggttggtgctgttggcatggcctgtgccatcagtatcttaatgaaggacttggcagatgaacttgctcttgttgatgtcatcgaagacaaattgaagggagagatgatggatctccaacatggcagccttttccttagaacaccaaagattgtctctgggaaagactatagtgtaactgcaaactccaagctggtcattatcacggctggggcacgtcaacaagagggagaaagccgtcttaatttggtccagcgtaacgtgaacatctttaaattcatcgttcctaatgttgtaaaatacagcccgaactgcaagttgcttattgtttcaaatccagtggatatcttgacctacgtggcttggaagataagtggttttcccaaaaaccgtgttattggaagtggttgcaatctggattcagccagattccgttacctgatgggggaaagactgggagttcacccattaagctgtcatgggtgggtccttggggaacatggagattccagtgtgcctgtatggagtggaatgaatgttgctggtgtctccctgaagactctgcacccagatttagggactgataaagataaggaacagtggaaagaggttcacaagcaggtggttgagagtgcttatgaggtgatcaaactcaaaggctacacatcctgggccattggactctctgtagcagatttggcagagagtataatgaagaatcttaggcgagtgcacccagtttccaccatgattaagggtctctatggaataaaggatgatgtcttcctcagtgttccttgcattttgggacagaatggaatctcagaccttgtgaaggtgactctgactcctgaggaagaggcccgtttgaagaagagtgcagatacactttgggggatccaaaaagagctgcaattttaaagtcttctgatgtcatagcatttcactgtctaggctacaacaggattctagttggaggttgtacatgttgtcctttttatctgatctgtgattaaaacagtaatattttaagatggactgggaaaagcattaactcctgaagttagaaataggaatggtttgtgaaatccacagctatatcctgatgctagatggtattaatcttgtgtagtcctaaactggttagtgtgaaatagttctgacgcaccactgccaattctgtacatgctgcatttgccccttgagccaggtggatgtttactgtgtgttttataatttcctggctccttcactgaacatgcctagtccaacattttttcccagtcagtcacatcctgggatccagtgtataaatccaatatcgtatgtcttgtgcataattgttccaaaggagcttattttgtgaactatatatatcagtagtgtacattaccacataacataaaaagatctacatataaacaatacaaccaactatccaagtgttataccaactaaaaaccccaataaaccttgaacagtga

SEQ ID NO: 18 - DNA, 1919 bp, Macaca mulatta
tcactgttcaaggtttattggggtttttagttggtataacacttggatagttggttgtattgtttatatgtagatctttttatgttatgtggtaatgtacactactgatatatatagttcacaaaataagctcctttggaacaattatgcacaagacatacgatattggatttatacactggatcccaggatgtgactgactgggaaaaaatgttggactaggcatgttcagtgaaggagccaggaaattataaaacacacagtaaacatccacctggctcaaggggcaaatgcagcatgtacagaattggcagtggtgcgtcagaactatttcacactaaccagtttaggactacacaagattaataccatctagcatcaggatatagctgtggatttcacaaaccattcctatttctaacttcaggagttaatgcttttcccagtccatcttaaaatattactgttttaatcacagatcagataaaaaggacaacatgtacaacctccaactagaatcctgttgtagcctagacagtgaaatgctatgacatcagaagactttaaaattgcagctctttttggatcccccaaagtgtatctgcactcttcttcaaacgggcctcttcctcaggagtcagagtcaccttcacaaggtctgagattccattctgtcccaaaatgcaaggaacactgaggaagacatcatcctttattccatagagacccttaatcatggtggaaactgggtgcactcgcctaagattcttcattatactctctgccaaatctgctacagagagtccaatggcccaggatgtgtagcctttgagtttgatcacctcataagcactctcaaccacctgcttgtgaacctctttccactgttccttatctttatcagtccctaaatctgggtgcagagtcttcagggagacaccagcaacattcattccactccatacaggcacactggaatctccatgttccccaaggacccacccatgacagcttaatgggtgaactcccagtctttcccccatcaggtaacggaatctggctgaatccagattgcaaccacttccaataacacggtttttgggaaaaccacttatcttccaagccacgtaggtcaagatatccactggatttgaaacaataagcaacttgcagttcgggctgtattttacaacattaggaacgatgaatttaaagatgttcacgttacgctggaccaaattaagacggctttctccctcttgttgacgtgccccagccgtgataatgaccagcttggagtttgcagttacactatagtctttcccagagacaatctttggtgttctaaggaaaaggctgccatgttggagatccatcatctctcccttcaatttgtcttcgatgacatcaacaagagcaagttcatctgccaagtccttcattaagatactgatggcacaggccatgccaacagcaccaaccccaacaactgtaatcttattctggggagtctgttcttcctttagaagattatgaatcagctgatccttgagagttgccatattggacttggaaccaaaaggaatcttagcgtggaaaaggaatatcgacgtttgggtgtaagtatagcctcctgagggctcacccatcgcggtttattaaccccaagtggggctggcctttcctcagacaagatcactttgagccactcctgctcctacagcaaggacacagccaggcttcaagtaaaaaccagaggtatgtgcagaaaagccactaactgccacaaagctcgagcccaaggcactgaagcgggcggtgatccgcgcgcatgcgcgctttgtggttctcctcgctcggaaaggtgggcggaaatcagactaatagctgcggcttcagaccgccctgcttttacgccc

SEQ ID NO: 19 - DNA, 1918 bp, Macaca fascicularis
agtgccttgggctcgagctttgtggcagttagtggcttttctgcacatacctctggtttttacttgaagcctggctgtgtccttgctgtaggagcaggagtggctcaaagtgatcttgtctgaggaaaggccagccccacttggggttaataaaccgcgatgggtgagccctcaggaggctatacttacacccaaacgtcgatattccttttccacgctaagattccttttggttccaagtccaatatggcaactctcaaggatcagctgattcataatcttctaaaggaagaacagactccccagaataagattacagttgttggggttggtgctgttggcatggcctgtgccatcagtatcttaatgaaggacttggcagatgaacttgctcttgttgatgtcatcgaagacaaattgaagggagagatgatggatctccaacatggcagccttttccttagaacaccaaagattgtctctgggaaagactatagtgtaactgcaaactccaagctggtcattatcacggctggggcacgtcaacaagagggagaaagccgtcttaatttggtccagcgtaacgtgaacatctttaaattcatcgttcctaatgttgtaaaatacagcccgaactgcaagttgcttattgtttcaaatccagtggatatcttgacctacgtggcttggaagataagtggttttcccaaaaaccgtgttattggaagtggttgcaatctggattcagccagattccgttacctgatgggggaaagactgggagttcacccattaagctgtcatgggtgggtccttggggaacatggagattccagtgtgcctgtatggagtggaatgaatgttgctggtgtctccctgaagactctgcacccagatttagggactgataaagataaggaacagtggaaagaggttcacaagcaggtggttgagagtgcttatgaggtgatcaaactcaaaggctacacatcctgggccattggactctctgtagcagatttggcagagagtataatgaagaatcttaggcgagtgcacccagtttccaccatgattaagggtctctatggaataaaggatgatgtcttcctcagtgttccttgcattttgggacagaatggaatctcagaccttgtgaaggtgactctgactcctgaggaagaggcccgtttgaagaagagtgcagatacactttgggggatccaaaaagagctgcaattttaaagtcttctgatgtcatagcatttcactgtctaggctacaacaggattctagttggaggttgtgcatgttgtcctttttatctgatctgtgattaaaacagtaatattttaagatggactgggaaaagcattaactcctgaagttagaaataggaatggtttgtgaaatccacagctatatcctgatgctagatggtattaatcttgtgtagtcctaaactggttagtgtgaaatagttctgacgcaccactgccaattctgtacatgctgcatttgccccttgagccaggtggatgtttactgtgtgttttataatttcctggctccttcactgaacatgcctagtccaacattttttcccagtcagtcacatcctgggatccagtgtataaatccaatatcgtatgtcttgtgcataattgttccaaaggagcttattttgtgaactatatatatcagtagtgtacattaccacataacataaaaagatctacatataaacaatacaaccaactatccaagtgttataccaactaaaaaccccaataaaccttgaacagtgaaaaaaaaaaaaaaaaaaaaattaaaaaaaaataaaaaaaaaaaaaaaaaaaaaaaaaaaaaaaaaaaaaaaaaaaaaaaaaaaaaaaaaaaaaaaaaaaaaaaaaaaaaa

SEQ ID NO: 20 - DNA, 1918 bp, Macaca fascicularis
ttttttttttttttttttttttttttttttttttttttttttttttttttttttttttttttttttttttttttttttatttttttttaatttttttttttttttttttttcactgttcaaggtttattggggtttttagttggtataacacttggatagttggttgtattgtttatatgtagatctttttatgttatgtggtaatgtacactactgatatatatagttcacaaaataagctcctttggaacaattatgcacaagacatacgatattggatttatacactggatcccaggatgtgactgactgggaaaaaatgttggactaggcatgttcagtgaaggagccaggaaattataaaacacacagtaaacatccacctggctcaaggggcaaatgcagcatgtacagaattggcagtggtgcgtcagaactatttcacactaaccagtttaggactacacaagattaataccatctagcatcaggatatagctgtggatttcacaaaccattcctatttctaacttcaggagttaatgcttttcccagtccatcttaaaatattactgttttaatcacagatcagataaaaaggacaacatgcacaacctccaactagaatcctgttgtagcctagacagtgaaatgctatgacatcagaagactttaaaattgcagctctttttggatcccccaaagtgtatctgcactcttcttcaaacgggcctcttcctcaggagtcagagtcaccttcacaaggtctgagattccattctgtcccaaaatgcaaggaacactgaggaagacatcatcctttattccatagagacccttaatcatggtggaaactgggtgcactcgcctaagattcttcattatactctctgccaaatctgctacagagagtccaatggcccaggatgtgtagcctttgagtttgatcacctcataagcactctcaaccacctgcttgtgaacctctttccactgttccttatctttatcagtccctaaatctgggtgcagagtcttcagggagacaccagcaacattcattccactccatacaggcacactggaatctccatgttccccaaggacccacccatgacagcttaatgggtgaactcccagtctttcccccatcaggtaacggaatctggctgaatccagattgcaaccacttccaataacacggtttttgggaaaaccacttatcttccaagccacgtaggtcaagatatccactggatttgaaacaataagcaacttgcagttcgggctgtattttacaacattaggaacgatgaatttaaagatgttcacgttacgctggaccaaattaagacggctttctccctcttgttgacgtgccccagccgtgataatgaccagcttggagtttgcagttacactatagtctttcccagagacaatctttggtgttctaaggaaaaggctgccatgttggagatccatcatctctcccttcaatttgtcttcgatgacatcaacaagagcaagttcatctgccaagtccttcattaagatactgatggcacaggccatgccaacagcaccaaccccaacaactgtaatcttattctggggagtctgttcttcctttagaagattatgaatcagctgatccttgagagttgccatattggacttggaaccaaaaggaatcttagcgtggaaaaggaatatcgacgtttgggtgtaagtatagcctcctgagggctcacccatcgcggtttattaaccccaagtggggctggcctttcctcagacaagatcactttgagccactcctgctcctacagcaaggacacagccaggcttcaagtaaaaaccagaggtatgtgcagaaaagccactaactgccacaaagctcgagcccaaggcact

SEQ ID NO: 21 - DNA, 1746 bp, Homo sapiens
ctgggatagcaataacctgtgaaaatgctcccccggctaatttgtatcaatgattatgaacaacatgctaaatcagtacttccaaagtctatatatgactattacaggtctggggcaaatgatgaagaaactttggctgataatattgcagcattttccagatggaagctgtatccaaggatgctccggaatgttgctgaaacagatctgtcgacttctgttttaggacagagggtcagcatgccaatatgtgtgggggctacggccatgcagcgcatggctcatgtggacggcgagcttgccactgtgagagcctgtcagtccctgggaacgggcatgatgttgagttcctgggccacctcctcaattgaagaagtggcggaagctggtcctgaggcacttcgttggctgcaactgtatatctacaaggaccgagaagtcaccaagaagctagtgcggcaggcagagaagatgggctacaaggccatatttgtgacagtggacacaccttacctgggcaaccgtctggatgatgtgcgtaacagattcaaactgccgccacaactcaggatgaaaaattttgaaaccagtactttatcattttctcctgaggaaaattttggagacgacagtggacttgctgcatatgtggctaaagcaatagacccatctatcagctgggaagatatcaaatggctgagaagactgacatcattgccaattgttgcaaagggcattttgagaggtgatgatgccagggaggctgttaaacatggcttgaatgggatcttggtgtcgaatcatggggctcgacaactcgatggggtgccagccactattgatgttctgccagaaattgtggaggctgtggaagggaaggtggaagtcttcctggacgggggtgtgcggaaaggcactgatgttctgaaagctctggctcttggcgccaaggctgtgtttgtggggagaccaatcgtttggggcttagctttccagggggagaaaggtgttcaagatgtcctcgagatactaaaggaagaattccggttggccatggctctgagtgggtgccagaatgtgaaagtcatcgacaagacattggtgaggaaaaatcctttggccgtttccaagatctgacagtgcacaatattttcccatctgtattattttttttcagcatgtattacttgacaaagagacactgtgcagagggtgaccacagtctgtaattccccacttcaatacaaagggtgtcgttcttttccaacaaaatagcaatcccttttatttcattgcttttgacttttcaatgggtgtcctaggaaccttttagaaagaaatggactttcatcctggaaatatattaactgttaaaaagaaaacattgaaaatgtgtttagacaacgtcatcccctggcaggctaaagtgctgtatcctttagtaaaattggaggtagcaaacactaaggtgaaaagataatgatctcattgtttattaacctgtattctgtttacatgtctttaaaacagtggttcttaaattgtaagctcaggttcaaagtgttggtaatgcctgattcacaactttgagaaggtagcactggagagaattggaatgggtggcggtaattggtgatacttctttgaatgtagatttccaatcacatctttagtgtctgaatatatccaaatgttttaggatgtatgttacttcttagagagaaataaagcatttttgggaagaat

SEQ ID NO: 22 - DNA, 1746 bp, Homo sapiens
attcttcccaaaaatgctttatttctctctaagaagtaacatacatcctaaaacatttggatatattcagacactaaagatgtgattggaaatctacattcaaagaagtatcaccaattaccgccacccattccaattctctccagtgctaccttctcaaagttgtgaatcaggcattaccaacactttgaacctgagcttacaatttaagaaccactgttttaaagacatgtaaacagaatacaggttaataaacaatgagatcattatcttttcaccttagtgtttgctacctccaattttactaaaggatacagcactttagcctgccaggggatgacgttgtctaaacacattttcaatgttttctttttaacagttaatatatttccaggatgaaagtccatttctttctaaaaggttcctaggacacccattgaaaagtcaaaagcaatgaaataaaagggattgctattttgttggaaaagaacgacaccctttgtattgaagtggggaattacagactgtggtcaccctctgcacagtgtctctttgtcaagtaatacatgctgaaaaaaaataatacagatgggaaaatattgtgcactgtcagatcttggaaacggccaaaggatttttcctcaccaatgtcttgtcgatgactttcacattctggcacccactcagagccatggccaaccggaattcttcctttagtatctcgaggacatcttgaacacctttctccccctggaaagctaagccccaaacgattggtctccccacaaacacagccttggcgccaagagccagagctttcagaacatcagtgcctttccgcacacccccgtccaggaagacttccaccttcccttccacagcctccacaatttctggcagaacatcaatagtggctggcaccccatcgagttgtcgagccccatgattcgacaccaagatcccattcaagccatgtttaacagcctccctggcatcatcacctctcaaaatgccctttgcaacaattggcaatgatgtcagtcttctcagccatttgatatcttcccagctgatagatgggtctattgctttagccacatatgcagcaagtccactgtcgtctccaaaattttcctcaggagaaaatgataaagtactggtttcaaaatttttcatcctgagttgtggcggcagtttgaatctgttacgcacatcatccagacggttgcccaggtaaggtgtgtccactgtcacaaatatggccttgtagcccatcttctctgcctgccgcactagcttcttggtgacttctcggtccttgtagatatacagttgcagccaacgaagtgcctcaggaccagcttccgccacttcttcaattgaggaggtggcccaggaactcaacatcatgcccgttcccagggactgacaggctctcacagtggcaagctcgccgtccacatgagccatgcgctgcatggccgtagcccccacacatattggcatgctgaccctctgtcctaaaacagaagtcgacagatctgtttcagcaacattccggagcatccttggatacagcttccatctggaaaatgctgcaatattatcagccaaagtttcttcatcatttgccccagacctgtaatagtcatatatagactttggaagtactgatttagcatgttgttcataatcattgatacaaattagccgggggagcattttcacaggttattgctatcccag

SEQ ID NO: 23 - DNA, 1801 bp, Macaca fascicularis
gtgaggatgtagaaagcaatacattaaaaaaaacccaaaaaactccatctgggataacaataacctgtgaaaatgctcccccggctaatttgtatcaatgattatgaacaacatgctaaatcagtacttccaaagtctatatatgactattataggtctggagcaaatgatgaagaaactttggccgataatgttgcagcattttccagatggaagctgtatccaaggatgctccggaatgttgctgaaacagatctgtcgacttctgttttaggacagagggtcagcatgccaatatgcgtgggggccacggccatgcagcgcatggctcatgtggatggcgagcttgccactgtgcgagcctgtcagtccctgggaacgggcatgatgttgagttcctgggccacctcctcaattgaagaagtggcagaagctggtcctgaggcacttcgttggttgtaactgtatatctataaggaccgagaagtcaccaagaagctggtgcagcaggcagagaagacgggctacaaggccatatttgtgacagtggacacaccttacctgggcaaccgtcttgatgatgtacgtaacagattcaagctgccaccacaactcaggatgaaaaattttgaaaccagtactttatcattttctcctgaggaaaattttggagatgacagtggacttgctgcatatgtggctaaagcgatagacccatctatcagctgggaagatatcaaatggctgagaagactgacgtcattgccaattgttgcaaagggcattttgagaggtgatgatgccagggaggctgttaaacatggcttgaatgggatcttggtgtcgaatcatggggctcgacaactcgatggggtgccagccactattgatgttctgccagaaattgtggaggccgtggaagggaaggtggaagtcttcctggacgggggtgtgcggaaaggcactgatgttctgaaagctctggctcttggcgccaaggctgtgtttgtggggagaccaatcatttggggcttagctttccagggggagaaaggtgttcaagatgtccttgagatactaaaggaagaattccggttggccatggctttgagtgggtgccagaatgtgaaagtcatcgacaagacattggtgaggaaaaatcctttggccgtttccaagatctgacagtgcacaatattttcccatctgtattatttttttttcagcatgtattacttgacaaagagacactgtgcagagggtgaccacagtctgtaattccccacttcaatacaaaggatgtcgttcttttccaacaaaatagcaatcccttttagttcattgcttttgacttttcaatgggtgtcctaggaaccttttagaaagaaatggactttcatcctggaaatatattaactgttaaaaagaaaacattgaaaatgtgtttagacaacgtcatcctctggcaggctaaagtactgtatcctttagtaaaattggaggtagcaaacactaaggtgaaaagataatgatctcattgtttattaacctgtattctgtttagatgtctttaaaacagtggttcttaaattgtaagctcaggttcaaagcattggaaatgcctgattgacaacattgagaaggtagccctggatagaattggaatggatggcagtaactggtgatacttctttgaatgcagctttccaatcacatctttagtgtctgaatatatccaaatgttttaggatatatgttacttcttaatcagagagaaataaagcattttttgggaaggata

SEQ ID NO: 24 - DNA, 1801 bp, Macaca fascicularis
tatccttcccaaaaaatgctttatttctctctgattaagaagtaacatatatcctaaaacatttggatatattcagacactaaagatgtgattggaaagctgcattcaaagaagtatcaccagttactgccatccattccaattctatccagggctaccttctcaatgttgtcaatcaggcatttccaatgctttgaacctgagcttacaatttaagaaccactgttttaaagacatctaaacagaatacaggttaataaacaatgagatcattatcttttcaccttagtgtttgctacctccaattttactaaaggatacagtactttagcctgccagaggatgacgttgtctaaacacattttcaatgttttctttttaacagttaatatatttccaggatgaaagtccatttctttctaaaaggttcctaggacacccattgaaaagtcaaaagcaatgaactaaaagggattgctattttgttggaaaagaacgacatcctttgtattgaagtggggaattacagactgtggtcaccctctgcacagtgtctctttgtcaagtaatacatgctgaaaaaaaaataatacagatgggaaaatattgtgcactgtcagatcttggaaacggccaaaggatttttcctcaccaatgtcttgtcgatgactttcacattctggcacccactcaaagccatggccaaccggaattcttcctttagtatctcaaggacatcttgaacacctttctccccctggaaagctaagccccaaatgattggtctccccacaaacacagccttggcgccaagagccagagctttcagaacatcagtgcctttccgcacacccccgtccaggaagacttccaccttcccttccacggcctccacaatttctggcagaacatcaatagtggctggcaccccatcgagttgtcgagccccatgattcgacaccaagatcccattcaagccatgtttaacagcctccctggcatcatcacctctcaaaatgccctttgcaacaattggcaatgacgtcagtcttctcagccatttgatatcttcccagctgatagatgggtctatcgctttagccacatatgcagcaagtccactgtcatctccaaaattttcctcaggagaaaatgataaagtactggtttcaaaatttttcatcctgagttgtggtggcagcttgaatctgttacgtacatcatcaagacggttgcccaggtaaggtgtgtccactgtcacaaatatggccttgtagcccgtcttctctgcctgctgcaccagcttcttggtgacttctcggtccttatagatatacagttacaaccaacgaagtgcctcaggaccagcttctgccacttcttcaattgaggaggtggcccaggaactcaacatcatgcccgttcccagggactgacaggctcgcacagtggcaagctcgccatccacatgagccatgcgctgcatggccgtggcccccacgcatattggcatgctgaccctctgtcctaaaacagaagtcgacagatctgtttcagcaacattccggagcatccttggatacagcttccatctggaaaatgctgcaacattatcggccaaagtttcttcatcatttgctccagacctataatagtcatatatagactttggaagtactgatttagcatgttgttcataatcattgatacaaattagccgggggagcattttcacaggttattgttatcccagatggagttttttgggttttttttaatgtattgctttctacatcctcac

SEQ ID NO: 25 - DNA, 2029 bp, Mus musculus
ggttgccctaccctgccacaatgttgcctcgactggtctgcatcagtgattatgaacagcatgtccgatcagtgcttcagaagtcagtgtatgactattacaggtctggggcaaatgatcaggagacgttagctgataacatccaagcattttctagatggaagctctatccacggatgcttcgcaacgttgctgatatcgatctgtcaacttctgttttaggacagagagtcagcatgccaatatgtgttggggctactgccatgcagtgcatggctcacgtggacggggagctggccactgtgcgagcctgtcagaccatgggaactggcatgatgctgagttcttgggctacctcctcaatagaagaagtggcagaagctggcccagaggcacttcgctggatgcaactgtacatctacaaagaccgtgagatcagcagacagatagtgaagcgagctgagaagcagggttacaaggccatatttgtgactgtggacaccccttacctgggcaaccgcattgatgacgtgcggaacaggttcaagctgccaccacaactcaggatgaaaaactttgaaaccaatgatttggcattttctcctaagggaaattttggagacaacagtggacttgctgaatatgtggcacaagctatagacccatctctcagctgggatgatattacatggctcagacgattgacatcactgcctattgttgtaaagggcattttgagaggtgatgatgccaaggaagctgttaaacatggtgtggatgggatcttggtgtcgaatcatggggcgcgacaactggatggggtgccagctactattgatgtcctgccagagattgttgaggctgtggaagggaaggtagaagtcttcctggatgggggagtaaggaaaggtactgatgttctcaaagctctggccctaggagccaaggccgtttttgtgggaagacccatcatctggggcttggctttccagggggagaaaggtgttcaagatgtcctcgagatattgaaggaagaattccgactggccatggctctgagtgggtgccagaatgtgaaagtcatcgacaagacattggtgaggaaaaatcctttggctgtttccaagatctgacagtgcacaatattttcccatctgtattattttttttccagcgtggattacttgacaaagagacactgtgcagagggtgaccacagactgtaactccccacttctatacaaagggtgtcgttcttttccaacaaaatagccaccccttttccttcattgcttttgacttttcaatgggtgtcctaggaaccttctagaaagaaatggacttgcatcctggaaatatattaactgttaaaaagaaaacattgaaaatgtgtttgggcaacgtcatcccctggcaggctaaagtgctggggaacaaaagatatcctctggtgagattgcaggtagcatgctgaagtgaaagatactgacctcactgttcattaacctgtcttctgtttagatttccttaagacagtggctcttacagtttgcacttggctttgaaatgctggaaatgcccagagaaacatgaggtttggatttgccatgttgagaaaatagcaccaggtagaattgaaatggatggtggtaatttgtgattttttttctagaaacttttcattttttaacaccctatttttttgaaggtagatttttagctatatatcacacgtctgaatatgtctggatgttttgtggcactcattgcatttgaaagggatgtgtctagtccagttgggaccacatggagctatttttacttttgaactttgtctcctcattctcattttaaaataagtgttgacttcctaattcctcttgaatcttttttgattttctcacttttcctcatttatagtcacattcagtgtaaagtacatattttgtggggtccgtgatgaataaagatttgaaattcttgttcagaaggaaggcaaaaaaaaaaaaaagtctttccttttatcaca

SEQ ID NO: 26 - DNA, 2029 bp, Mus musculus
tgtgataaaaggaaagacttttttttttttttgccttccttctgaacaagaatttcaaatctttattcatcacggaccccacaaaatatgtactttacactgaatgtgactataaatgaggaaaagtgagaaaatcaaaaaagattcaagaggaattaggaagtcaacacttattttaaaatgagaatgaggagacaaagttcaaaagtaaaaatagctccatgtggtcccaactggactagacacatccctttcaaatgcaatgagtgccacaaaacatccagacatattcagacgtgtgatatatagctaaaaatctaccttcaaaaaaatagggtgttaaaaaatgaaaagtttctagaaaaaaaatcacaaattaccaccatccatttcaattctacctggtgctattttctcaacatggcaaatccaaacctcatgtttctctgggcatttccagcatttcaaagccaagtgcaaactgtaagagccactgtcttaaggaaatctaaacagaagacaggttaatgaacagtgaggtcagtatctttcacttcagcatgctacctgcaatctcaccagaggatatcttttgttccccagcactttagcctgccaggggatgacgttgcccaaacacattttcaatgttttctttttaacagttaatatatttccaggatgcaagtccatttctttctagaaggttcctaggacacccattgaaaagtcaaaagcaatgaaggaaaaggggtggctattttgttggaaaagaacgacaccctttgtatagaagtggggagttacagtctgtggtcaccctctgcacagtgtctctttgtcaagtaatccacgctggaaaaaaaataatacagatgggaaaatattgtgcactgtcagatcttggaaacagccaaaggatttttcctcaccaatgtcttgtcgatgactttcacattctggcacccactcagagccatggccagtcggaattcttccttcaatatctcgaggacatcttgaacacctttctccccctggaaagccaagccccagatgatgggtcttcccacaaaaacggccttggctcctagggccagagctttgagaacatcagtacctttccttactcccccatccaggaagacttctaccttcccttccacagcctcaacaatctctggcaggacatcaatagtagctggcaccccatccagttgtcgcgccccatgattcgacaccaagatcccatccacaccatgtttaacagcttccttggcatcatcacctctcaaaatgccctttacaacaataggcagtgatgtcaatcgtctgagccatgtaatatcatcccagctgagagatgggtctatagcttgtgccacatattcagcaagtccactgttgtctccaaaatttcccttaggagaaaatgccaaatcattggtttcaaagtttttcatcctgagttgtggtggcagcttgaacctgttccgcacgtcatcaatgcggttgcccaggtaaggggtgtccacagtcacaaatatggccttgtaaccctgcttctcagctcgcttcactatctgtctgctgatctcacggtctttgtagatgtacagttgcatccagcgaagtgcctctgggccagcttctgccacttcttctattgaggaggtagcccaagaactcagcatcatgccagttcccatggtctgacaggctcgcacagtggccagctccccgtccacgtgagccatgcactgcatggcagtagccccaacacatattggcatgctgactctctgtcctaaaacagaagttgacagatcgatatcagcaacgttgcgaagcatccgtggatagagcttccatctagaaaatgcttggatgttatcagctaacgtctcctgatcatttgccccagacctgtaatagtcatacactgacttctgaagcactgatcggacatgctgttcataatcactgatgcagaccagtcgaggcaacattgtggcagggtagggcaacc

SEQ ID NO: 27 - DNA, 1527 bp, Rattus norvegicus
catcccctgacacaatgttgcctcggctggtctgcatcagtgactatgaacagcatgcccggacagtgcttcagaagtcagtatatgattattacaagtctggggcaaatgaccaggagactttggctgataatatcagagcattttctaggtggaagctctatccacggatgctgcgcaacgttgctgatatcgacctgtcgacttctgttttaggacagagagtgagcatgccaatatgcgttggggctacggctatgcagtgcatggctcatgtggatggggagctggccactgttcgagcctgtcagaccatgggaactggcatgatgttgagttcctgggccacttcctcaatagaagaggtggcagaggctggcccggaggcacttcgctggatgcaactctacatctacaaagatcgtgaggtcagcagtcagctagtgaagagggctgagcagatgggttacaaggccatatttgtgactgtggacaccccttacctgggaaatcgcttcgatgatgtgcggaacaggttcaagctaccaccacagctcaggatgaaaaactttgaaaccaacgatttggcattttctcctaaggggaattttggagacaacagtggccttgctgaatatgtggcacaagccatagacccatctctcagctgggatgatattaaatggctcagacggttgacctcactgcccattgttgtaaagggaattttgagaggtgatgatgcccaggaagctgttaaacatggtgtggatgggatcttagtgtcgaatcatggggcacgacaactggatggggtgccagctactattgatgccctgccagagatcgttgaggctgtggaagggaaggtagaagtcttcctggatgggggagtcaggaaaggcaccgatgttctcaaagctctggccctgggagccagagctgtttttgtggggagacccatcatctggggcttggctttccagggggagaaaggtgttcaagatgtcctcgagatactgaaggaagagttccggctggccatggctctgagtgggtgccagaatgtgaaagtcatcgacaagacattggtgaggaaaaatcctttggctgtttccaagatctgacagtgcacaatattttcccatctgtattatttttttccagcatggattacttgacaaagagacactgtgcagagggtgaccacagactgtaactccccacttcaacacaaagggtgtcgttcttttccaacaaaatagccaccccttctccttcattgcttttgacttttcaatgggtgtcctaggaaccttctagaaagaaatggacttgcatcctggaaatatattaactgttaaaaagaaaacattgaaaatgtgtttgggcaacgtcatcccctggcaggctaaagtgagggggaacaaaagatatcctctggtgagattggaggtagcatgccgaagtaaaagacactgacctcactgtttattaaaaaaaaaaaaaaaaaaaaaaaaaaaaaaa

SEQ ID NO: 28 - DNA, 1527 bp, Rattus norvegicus
tttttttttttttttttttttttttttttttaataaacagtgaggtcagtgtcttttacttcggcatgctacctccaatctcaccagaggatatcttttgttccccctcactttagcctgccaggggatgacgttgcccaaacacattttcaatgttttctttttaacagttaatatatttccaggatgcaagtccatttctttctagaaggttcctaggacacccattgaaaagtcaaaagcaatgaaggagaaggggtggctattttgttggaaaagaacgacaccctttgtgttgaagtggggagttacagtctgtggtcaccctctgcacagtgtctctttgtcaagtaatccatgctggaaaaaaataatacagatgggaaaatattgtgcactgtcagatcttggaaacagccaaaggatttttcctcaccaatgtcttgtcgatgactttcacattctggcacccactcagagccatggccagccggaactcttccttcagtatctcgaggacatcttgaacacctttctccccctggaaagccaagccccagatgatgggtctccccacaaaaacagctctggctcccagggccagagctttgagaacatcggtgcctttcctgactcccccatccaggaagacttctaccttcccttccacagcctcaacgatctctggcagggcatcaatagtagctggcaccccatccagttgtcgtgccccatgattcgacactaagatcccatccacaccatgtttaacagcttcctgggcatcatcacctctcaaaattccctttacaacaatgggcagtgaggtcaaccgtctgagccatttaatatcatcccagctgagagatgggtctatggcttgtgccacatattcagcaaggccactgttgtctccaaaattccccttaggagaaaatgccaaatcgttggtttcaaagtttttcatcctgagctgtggtggtagcttgaacctgttccgcacatcatcgaagcgatttcccaggtaaggggtgtccacagtcacaaatatggccttgtaacccatctgctcagccctcttcactagctgactgctgacctcacgatctttgtagatgtagagttgcatccagcgaagtgcctccgggccagcctctgccacctcttctattgaggaagtggcccaggaactcaacatcatgccagttcccatggtctgacaggctcgaacagtggccagctccccatccacatgagccatgcactgcatagccgtagccccaacgcatattggcatgctcactctctgtcctaaaacagaagtcgacaggtcgatatcagcaacgttgcgcagcatccgtggatagagcttccacctagaaaatgctctgatattatcagccaaagtctcctggtcatttgccccagacttgtaataatcatatactgacttctgaagcactgtccgggcatgctgttcatagtcactgatgcagaccagccgaggcaacattgtgtcaggggatg

SEQ ID NO: 29 - RNA, 21 nt, Artificial Sequence
  source: /note="Description of Artificial Sequence: Synthetic oligonucleotide"
cuuuucaauggguguccuaga

SEQ ID NO: 30 - RNA, 21 nt, Artificial Sequence
  source: /note="Description of Artificial Sequence: Synthetic oligonucleotide"
ucaauggguguccuaggaaca

SEQ ID NO: 31 - RNA, 21 nt, Artificial Sequence
  source: /note="Description of Artificial Sequence: Synthetic oligonucleotide"
uugacuuuucaauggguguca

SEQ ID NO: 32 - RNA, 21 nt, Artificial Sequence
  source: /note="Description of Artificial Sequence: Synthetic oligonucleotide"
aaagucaucgacaagacauua

SEQ ID NO: 33 - RNA, 21 nt, Artificial Sequence
  source: /note="Description of Artificial Sequence: Synthetic oligonucleotide"
cagggggagaaagguguucaa

SEQ ID NO: 34 - RNA, 21 nt, Artificial Sequence
  source: /note="Description of Artificial Sequence: Synthetic oligonucleotide"
cauuggugaggaaaaauccuu

SEQ ID NO: 35 - RNA, 21 nt, Artificial Sequence
  source: /note="Description of Artificial Sequence: Synthetic oligonucleotide"
acauuggugaggaaaaauccu

SEQ ID NO: 36 - RNA, 21 nt, Artificial Sequence
  source: /note="Description of Artificial Sequence: Synthetic oligonucleotide"
agggggagaaagguguucaaa

SEQ ID NO: 37 - RNA, 21 nt, Artificial Sequence
  source: /note="Description of Artificial Sequence: Synthetic oligonucleotide"
auggugguaauuugugauuuu

SEQ ID NO: 38 - RNA, 21 nt, Artificial Sequence
  source: /note="Description of Artificial Sequence: Synthetic oligonucleotide"
gacuugcauccuggaaauaua

SEQ ID NO: 39 - RNA, 21 nt, Artificial Sequence
  source: /note="Description of Artificial Sequence: Synthetic oligonucleotide"
ggaagggaagguagaagucuu

SEQ ID NO: 40 - RNA, 21 nt, Artificial Sequence
  source: /note="Description of Artificial Sequence: Synthetic oligonucleotide"
ugucuucuguuuagauuuccu

SEQ ID NO: 41 - RNA, 21 nt, Artificial Sequence
  source: /note="Description of Artificial Sequence: Synthetic oligonucleotide"
cuuuggcuguuuccaagaucu

SEQ ID NO: 42 - RNA, 21 nt, Artificial Sequence
  source: /note="Description of Artificial Sequence: Synthetic oligonucleotide"
aauguguuugggcaacgucau

SEQ ID NO: 43 - RNA, 21 nt, Artificial Sequence
  source: /note="Description of Artificial Sequence: Synthetic oligonucleotide"
ugugacuguggacaccccuua

SEQ ID NO: 44 - RNA, 21 nt, Artificial Sequence
  source: /note="Description of Artificial Sequence: Synthetic oligonucleotide"
gauggggugccagcuacuauu

SEQ ID NO: 45 - RNA, 21 nt, Artificial Sequence
  source: /note="Description of Artificial Sequence: Synthetic oligonucleotide"
gaaaauguguuugggcaacgu

SEQ ID NO: 46 - RNA, 21 nt, Artificial Sequence
  source: /note="Description of Artificial Sequence: Synthetic oligonucleotide"
ggcuguuuccaagaucugaca

SEQ ID NO: 47 - RNA, 21 nt, Artificial Sequence
  source: /note="Description of Artificial Sequence: Synthetic oligonucleotide"
uccaacaaaauagccaccccu

SEQ ID NO: 48 - RNA, 21 nt, Artificial Sequence
  source: /note="Description of Artificial Sequence: Synthetic oligonucleotide"
gucuucuguuuagauuuccuu

SEQ ID NO: 49 - RNA, 21 nt, Artificial Sequence
  source: /note="Description of Artificial Sequence: Synthetic oligonucleotide"
uggaagggaagguagaagucu

SEQ ID NO: 50 - RNA, 21 nt, Artificial Sequence
  source: /note="Description of Artificial Sequence: Synthetic oligonucleotide"
uccuuuggcuguuuccaagau

SEQ ID NO: 51 - RNA, 21 nt, Artificial Sequence
  source: /note="Description of Artificial Sequence: Synthetic oligonucleotide"
caucucucagcugggaugaua

SEQ ID NO: 52 - RNA, 21 nt, Artificial Sequence
  source: /note="Description of Artificial Sequence: Synthetic oligonucleotide"
ggggugccagcuacuauugau

SEQ ID NO: 53 - RNA, 21 nt, Artificial Sequence
  source: /note="Description of Artificial Sequence: Synthetic oligonucleotide"
auguguuugggcaacgucaua

SEQ ID NO: 54 - RNA, 21 nt, Artificial Sequence
  source: /note="Description of Artificial Sequence: Synthetic oligonucleotide"
cuguuuagauuuccuuaagaa

SEQ ID NO: 55 - RNA, 21 nt, Artificial Sequence
  source: /note="Description of Artificial Sequence: Synthetic oligonucleotide"
agaaagaaauggacuugcaua

SEQ ID NO: 56 - RNA, 21 nt, Artificial Sequence
  source: /note="Description of Artificial Sequence: Synthetic oligonucleotide"
gcauccuggaaauauauuaaa

SEQ ID NO: 57 - RNA, 21 nt, Artificial Sequence
  source: /note="Description of Artificial Sequence: Synthetic oligonucleotide"
ccugucagaccaugggaacua

SEQ ID NO: 58 - RNA, 21 nt, Artificial Sequence
  source: /note="Description of Artificial Sequence: Synthetic oligonucleotide"
aaacaugguguggaugggaua

SEQ ID NO: 59 - RNA, 21 nt, Artificial Sequence
  source: /note="Description of Artificial Sequence: Synthetic oligonucleotide"
cucaggaugaaaaauuuugaa

SEQ ID NO: 60 - RNA, 21 nt, Artificial Sequence
  source: /note="Description of Artificial Sequence: Synthetic oligonucleotide"
cagcauguauuacuugacaaa

SEQ ID NO: 61 - RNA, 21 nt, Artificial Sequence
  source: /note="Description of Artificial Sequence: Synthetic oligonucleotide"
uaugaacaacaugcuaaauca

SEQ ID NO: 62 - RNA, 21 nt, Artificial Sequence
  source: /note="Description of Artificial Sequence: Synthetic oligonucleotide"
auauauccaaauguuuuagga

SEQ ID NO: 63 - RNA, 21 nt, Artificial Sequence
  source: /note="Description of Artificial Sequence: Synthetic oligonucleotide"
ccagauggaagcuguauccaa

SEQ ID NO: 64 - RNA, 21 nt, Artificial Sequence
  source: /note="Description of Artificial Sequence: Synthetic oligonucleotide"
gacuuucauccuggaaauaua

SEQ ID NO: 65 - RNA, 21 nt, Artificial Sequence
  source: /note="Description of Artificial Sequence: Synthetic oligonucleotide"
ccccggcuaauuuguaucaau

SEQ ID NO: 66 - RNA, 21 nt, Artificial Sequence
  source: /note="Description of Artificial Sequence: Synthetic oligonucleotide"
uuaaacauggcuugaauggga

SEQ ID NO: 67 - RNA, 21 nt, Artificial Sequence
  source: /note="Description of Artificial Sequence: Synthetic oligonucleotide"
aauguguuuagacaacgucau

SEQ ID NO: 68 - RNA, 21 nt, Artificial Sequence
  source: /note="Description of Artificial Sequence: Synthetic oligonucleotide"
acuaaaggaagaauuccgguu

SEQ ID NO: 69 - RNA, 21 nt, Artificial Sequence
  source: /note="Description of Artificial Sequence: Synthetic oligonucleotide"
uauauccaaauguuuuaggau

SEQ ID NO: 70 - RNA, 21 nt, Artificial Sequence
  source: /note="Description of Artificial Sequence: Synthetic oligonucleotide"
gugcggaaaggcacugauguu

SEQ ID NO: 71 - RNA, 21 nt, Artificial Sequence
  source: /note="Description of Artificial Sequence: Synthetic oligonucleotide"
uaaaacagugguucuuaaauu

SEQ ID NO: 72 - RNA, 21 nt, Artificial Sequence
  source: /note="Description of Artificial Sequence: Synthetic oligonucleotide"
augaaaaauuuugaaaccagu

SEQ ID NO: 73 - RNA, 21 nt, Artificial Sequence
  source: /note="Description of Artificial Sequence: Synthetic oligonucleotide"
aacaaaauagcaaucccuuuu

SEQ ID NO: 74 - RNA, 21 nt, Artificial Sequence
  source: /note="Description of Artificial Sequence: Synthetic oligonucleotide"
cugaaacagaucugucgacuu

SEQ ID NO: 75 - RNA, 21 nt, Artificial Sequence
  source: /note="Description of Artificial Sequence: Synthetic oligonucleotide"
uuguugcaaagggcauuuuga

SEQ ID NO: 76 - RNA, 21 nt, Artificial Sequence
  source: /note="Description of Artificial Sequence: Synthetic oligonucleotide"
cucauuguuuauuaaccugua

SEQ ID NO: 77 - RNA, 21 nt, Artificial Sequence
  source: /note="Description of Artificial Sequence: Synthetic oligonucleotide"
caacaaaauagcaaucccuuu

SEQ ID NO: 78 - RNA, 21 nt, Artificial Sequence
  source: /note="Description of Artificial Sequence: Synthetic oligonucleotide"
cauuguuuauuaaccuguauu

SEQ ID NO: 79 - RNA, 21 nt, Artificial Sequence
  source: /note="Description of Artificial Sequence: Synthetic oligonucleotide"
uaucagcugggaagauaucaa

SEQ ID NO: 80 - RNA, 21 nt, Artificial Sequence
  source: /note="Description of Artificial Sequence: Synthetic oligonucleotide"
uguccuaggaaccuuuuagaa

SEQ ID NO: 81 - RNA, 21 nt, Artificial Sequence
  source: /note="Description of Artificial Sequence: Synthetic oligonucleotide"
uccaacaaaauagcaaucccu

SEQ ID NO: 82 - RNA, 21 nt, Artificial Sequence
  source: /note="Description of Artificial Sequence: Synthetic oligonucleotide"
ggugugcggaaaggcacugau

SEQ ID NO: 83 - RNA, 21 nt, Artificial Sequence
  source: /note="Description of Artificial Sequence: Synthetic oligonucleotide"
uugaaaccaguacuuuaucau

SEQ ID NO: 84 - RNA, 21 nt, Artificial Sequence
  source: /note="Description of Artificial Sequence: Synthetic oligonucleotide"
uacuuccaaagucuauauaua

SEQ ID NO: 85 - RNA, 21 nt, Artificial Sequence
  source: /note="Description of Artificial Sequence: Synthetic oligonucleotide"
uccuaggaaccuuuuagaaau

SEQ ID NO: 86 - RNA, 21 nt, Artificial Sequence
  source: /note="Description of Artificial Sequence: Synthetic oligonucleotide"
cuccugaggaaaauuuuggaa

SEQ ID NO: 87 - RNA, 21 nt, Artificial Sequence
  source: /note="Description of Artificial Sequence: Synthetic oligonucleotide"
gcuccggaauguugcugaaau

SEQ ID NO: 88 - RNA, 21 nt, Artificial Sequence
  source: /note="Description of Artificial Sequence: Synthetic oligonucleotide"
guguuuguggggagaccaaua

SEQ ID NO: 89 - RNA, 23 nt, Artificial Sequence
  source: /note="Description of Artificial Sequence: Synthetic oligonucleotide"
uugucgaugacuuucacauucug

SEQ ID NO: 90 - RNA, 23 nt, Artificial Sequence
  source: /note="Description of Artificial Sequence: Synthetic oligonucleotide"
uccuaggacacccauugaaaagu

SEQ ID NO: 91 - RNA, 23 nt, Artificial Sequence
  source: /note="Description of Artificial Sequence: Synthetic oligonucleotide"
aaugucuugucgaugacuuucac

SEQ ID NO: 92 - RNA, 23 nt, Artificial Sequence
  source: /note="Description of Artificial Sequence: Synthetic oligonucleotide"
ucaccaaugucuugucgaugacu

SEQ ID NO: 93 - RNA, 23 nt, Artificial Sequence
  source: /note="Description of Artificial Sequence: Synthetic oligonucleotide"
uuccuaggacacccauugaaaag

SEQ ID NO: 94 - RNA, 23 nt, Artificial Sequence
  source: /note="Description of Artificial Sequence: Synthetic oligonucleotide"
aagguuccuaggacacccauuga

SEQ ID NO: 95 - RNA, 23 nt, Artificial Sequence
  source: /note="Description of Artificial Sequence: Synthetic oligonucleotide"
uggaaaauauugugcacugucag

SEQ ID NO: 96 - RNA, 23 nt, Artificial Sequence
  source: /note="Description of Artificial Sequence: Synthetic oligonucleotide"
uuaggacacccauugaaaaguca

SEQ ID NO: 97 - RNA, 23 nt, Artificial Sequence
  source: /note="Description of Artificial Sequence: Synthetic oligonucleotide"
ucaaugucuugucgaugacuuuc

SEQ ID NO: 98 - RNA, 23 nt, Artificial Sequence
  source: /note="Description of Artificial Sequence: Synthetic oligonucleotide"
ucucaccaaugucuugucgauga

SEQ ID NO: 99 - RNA, 23 nt, Artificial Sequence
  source: /note="Description of Artificial Sequence: Synthetic oligonucleotide"
uaucuugaacaccuuucuccccc

SEQ ID NO: 100 - RNA, 23 nt, Artificial Sequence
  source: /note="Description of Artificial Sequence: Synthetic oligonucleotide"
ucuaggacacccauugaaaaguc

SEQ ID NO: 101 - RNA, 23 nt, Artificial Sequence
  source: /note="Description of Artificial Sequence: Synthetic oligonucleotide"
uguuccuaggacacccauugaaa

SEQ ID NO: 102 - RNA, 23 nt, Artificial Sequence
  source: /note="Description of Artificial Sequence: Synthetic oligonucleotide"
ugacacccauugaaaagucaaaa

SEQ ID NO: 103 - RNA, 23 nt, Artificial Sequence
  source: /note="Description of Artificial Sequence: Synthetic oligonucleotide"
uaaugucuugucgaugacuuuca

SEQ ID NO: 104 - RNA, 23 nt, Artificial Sequence
  source: /note="Description of Artificial Sequence: Synthetic oligonucleotide"
uugaacaccuuucucccccugga

SEQ ID NO: 105 - RNA, 23 nt, Artificial Sequence
  source: /note="Description of Artificial Sequence: Synthetic oligonucleotide"
aaggauuuuuccucaccaauguc

SEQ ID NO: 106 - RNA, 23 nt, Artificial Sequence
  source: /note="Description of Artificial Sequence: Synthetic oligonucleotide"
aggauuuuuccucaccaaugucu

SEQ ID NO: 107 - RNA, 23 nt, Artificial Sequence
  source: /note="Description of Artificial Sequence: Synthetic oligonucleotide"
uuugaacaccuuucucccccugg

SEQ ID NO: 108 - RNA, 23 nt, Artificial Sequence
  source: /note="Description of Artificial Sequence: Synthetic oligonucleotide"
aaaaucacaaauuaccaccaucc

SEQ ID NO: 109 - RNA, 23 nt, Artificial Sequence
  source: /note="Description of Artificial Sequence: Synthetic oligonucleotide"
uauauuuccaggaugcaagucca

SEQ ID NO: 110 - RNA, 23 nt, Artificial Sequence
  source: /note="Description of Artificial Sequence: Synthetic oligonucleotide"
aagacuucuaccuucccuuccac

SEQ ID NO: 111 - RNA, 23 nt, Artificial Sequence
  source: /note="Description of Artificial Sequence: Synthetic oligonucleotide"
aggaaaucuaaacagaagacagg

SEQ ID NO: 112 - RNA, 23 nt, Artificial Sequence
  source: /note="Description of Artificial Sequence: Synthetic oligonucleotide"
agaucuuggaaacagccaaagga

SEQ ID NO: 113 - RNA, 23 nt, Artificial Sequence
  source: /note="Description of Artificial Sequence: Synthetic oligonucleotide"
augacguugcccaaacacauuuu

SEQ ID NO: 114 - RNA, 23 nt, Artificial Sequence
  source: /note="Description of Artificial Sequence: Synthetic oligonucleotide"
uaagggguguccacagucacaaa

SEQ ID NO: 115 - RNA, 23 nt, Artificial Sequence
  source: /note="Description of Artificial Sequence: Synthetic oligonucleotide"
aauaguagcuggcaccccaucca

SEQ ID NO: 116 - RNA, 23 nt, Artificial Sequence
  source: /note="Description of Artificial Sequence: Synthetic oligonucleotide"
acguugcccaaacacauuuucaa

SEQ ID NO: 117 - RNA, 23 nt, Artificial Sequence
  source: /note="Description of Artificial Sequence: Synthetic oligonucleotide"
ugucagaucuuggaaacagccaa

SEQ ID NO: 118 - RNA, 23 nt, Artificial Sequence
  source: /note="Description of Artificial Sequence: Synthetic oligonucleotide"
agggguggcuauuuuguuggaaa

SEQ ID NO: 119 - RNA, 23 nt, Artificial Sequence
  source: /note="Description of Artificial Sequence: Synthetic oligonucleotide"
aaggaaaucuaaacagaagacag

SEQ ID NO: 120 - RNA, 23 nt, Artificial Sequence
  source: /note="Description of Artificial Sequence: Synthetic oligonucleotide"
agacuucuaccuucccuuccaca

SEQ ID NO: 121 - RNA, 23 nt, Artificial Sequence
  source: /note="Description of Artificial Sequence: Synthetic oligonucleotide"
aucuuggaaacagccaaaggauu

SEQ ID NO: 122 - RNA, 23 nt, Artificial Sequence
  source: /note="Description of Artificial Sequence: Synthetic oligonucleotide"
uaucaucccagcugagagauggg

SEQ ID NO: 123 - RNA, 23 nt, Artificial Sequence
  source: /note="Description of Artificial Sequence: Synthetic oligonucleotide"
aucaauaguagcuggcaccccau

SEQ ID NO: 124 - RNA, 23 nt, Artificial Sequence
  source: /note="Description of Artificial Sequence: Synthetic oligonucleotide"
uaugacguugcccaaacacauuu

SEQ ID NO: 125 - RNA, 23 nt, Artificial Sequence
  source: /note="Description of Artificial Sequence: Synthetic oligonucleotide"
uucuuaaggaaaucuaaacagaa

SEQ ID NO: 126 - RNA, 23 nt, Artificial Sequence
  source: /note="Description of Artificial Sequence: Synthetic oligonucleotide"
uaugcaaguccauuucuuucuag

SEQ ID NO: 127 - RNA, 23 nt, Artificial Sequence
  source: /note="Description of Artificial Sequence: Synthetic oligonucleotide"
uuuaauauauuuccaggaugcaa

SEQ ID NO: 128 - RNA, 23 nt, Artificial Sequence
  source: /note="Description of Artificial Sequence: Synthetic oligonucleotide"
uaguucccauggucugacaggcu

SEQ ID NO: 129 - RNA, 23 nt, Artificial Sequence
  source: /note="Description of Artificial Sequence: Synthetic oligonucleotide"
uaucccauccacaccauguuuaa

SEQ ID NO: 130 - RNA, 23 nt, Artificial Sequence
  source: /note="Description of Artificial Sequence: Synthetic oligonucleotide"
uucaaaauuuuucauccugaguu

SEQ ID NO: 131 - RNA, 23 nt, Artificial Sequence
  source: /note="Description of Artificial Sequence: Synthetic oligonucleotide"
uuugucaaguaauacaugcugaa

SEQ ID NO: 132 - RNA, 23 nt, Artificial Sequence
  source: /note="Description of Artificial Sequence: Synthetic oligonucleotide"
ugauuuagcauguuguucauaau

SEQ ID NO: 133 - RNA, 23 nt, Artificial Sequence
  source: /note="Description of Artificial Sequence: Synthetic oligonucleotide"
uccuaaaacauuuggauauauuc

SEQ ID NO: 134 - RNA, 23 nt, Artificial Sequence
  source: /note="Description of Artificial Sequence: Synthetic oligonucleotide"
uuggauacagcuuccaucuggaa

SEQ ID NO: 135 - RNA, 23 nt, Artificial Sequence
  source: /note="Description of Artificial Sequence: Synthetic oligonucleotide"
uauauuuccaggaugaaagucca

SEQ ID NO: 136 - RNA, 23 nt, Artificial Sequence
  source: /note="Description of Artificial Sequence: Synthetic oligonucleotide"
auugauacaaauuagccggggga

SEQ ID NO: 137 - RNA, 23 nt, Artificial Sequence
  source: /note="Description of Artificial Sequence: Synthetic oligonucleotide"
ucccauucaagccauguuuaaca

SEQ ID NO: 138 - RNA, 23 nt, Artificial Sequence
  source: /note="Description of Artificial Sequence: Synthetic oligonucleotide"
augacguugucuaaacacauuuu

SEQ ID NO: 139 - RNA, 23 nt, Artificial Sequence
  source: /note="Description of Artificial Sequence: Synthetic oligonucleotide"
aaccggaauucuuccuuuaguau

SEQ ID NO: 140 - RNA, 23 nt, Artificial Sequence
  source: /note="Description of Artificial Sequence: Synthetic oligonucleotide"
auccuaaaacauuuggauauauu

SEQ ID NO: 141 - RNA, 23 nt, Artificial Sequence
  source: /note="Description of Artificial Sequence: Synthetic oligonucleotide"
aacaucagugccuuuccgcacac

SEQ ID NO: 142 - RNA, 23 nt, Artificial Sequence
  source: /note="Description of Artificial Sequence: Synthetic oligonucleotide"
aauuuaagaaccacuguuuuaaa

SEQ ID NO: 143 - RNA, 23 nt, Artificial Sequence
  source: /note="Description of Artificial Sequence: Synthetic oligonucleotide"
acugguuucaaaauuuuucaucc

SEQ ID NO: 144 - RNA, 23 nt, Artificial Sequence
  source: /note="Description of Artificial Sequence: Synthetic oligonucleotide"
aaaagggauugcuauuuuguugg

SEQ ID NO: 145 - RNA, 23 nt, Artificial Sequence
  source: /note="Description of Artificial Sequence: Synthetic oligonucleotide"
aagucgacagaucuguuucagca

SEQ ID NO: 146 - RNA, 23 nt, Artificial Sequence
  source: /note="Description of Artificial Sequence: Synthetic oligonucleotide"
ucaaaaugcccuuugcaacaauu

SEQ ID NO: 147 - RNA, 23 nt, Artificial Sequence
  source: /note="Description of Artificial Sequence: Synthetic oligonucleotide"
uacagguuaauaaacaaugagau

SEQ ID NO: 148 - RNA, 23 nt, Artificial Sequence
  source: /note="Description of Artificial Sequence: Synthetic oligonucleotide"
aaagggauugcuauuuuguugga

SEQ ID NO: 149 - RNA, 23 nt, Artificial Sequence
  source: /note="Description of Artificial Sequence: Synthetic oligonucleotide"
aauacagguuaauaaacaaugag

SEQ ID NO: 150 - RNA, 23 nt, Artificial Sequence
  source: /note="Description of Artificial Sequence: Synthetic oligonucleotide"
uugauaucuucccagcugauaga

SEQ ID NO: 151 - RNA, 23 nt, Artificial Sequence
  source: /note="Description of Artificial Sequence: Synthetic oligonucleotide"
uucuaaaagguuccuaggacacc

SEQ ID NO: 152 - RNA, 23 nt, Artificial Sequence
  source: /note="Description of Artificial Sequence: Synthetic oligonucleotide"
agggauugcuauuuuguuggaaa

SEQ ID NO: 153 - RNA, 23 nt, Artificial Sequence
  source: /note="Description of Artificial Sequence: Synthetic oligonucleotide"
aucagugccuuuccgcacacccc

SEQ ID NO: 154 - RNA, 23 nt, Artificial Sequence
  source: /note="Description of Artificial Sequence: Synthetic oligonucleotide"
augauaaaguacugguuucaaaa

SEQ ID NO: 155 - RNA, 23 nt, Artificial Sequence
  source: /note="Description of Artificial Sequence: Synthetic oligonucleotide"
uauauauagacuuuggaaguacu

SEQ ID NO: 156 - RNA, 23 nt, Artificial Sequence
  source: /note="Description of Artificial Sequence: Synthetic oligonucleotide"
auuucuaaaagguuccuaggaca

SEQ ID NO: 157 - RNA, 23 nt, Artificial Sequence
  source: /note="Description of Artificial Sequence: Synthetic oligonucleotide"
uuccaaaauuuuccucaggagaa

SEQ ID NO: 158 - RNA, 23 nt, Artificial Sequence
  source: /note="Description of Artificial Sequence: Synthetic oligonucleotide"
auuucagcaacauuccggagcau

SEQ ID NO: 159 - RNA, 23 nt, Artificial Sequence
  source: /note="Description of Artificial Sequence: Synthetic oligonucleotide"
uauuggucuccccacaaacacag

SEQ ID NO: 160 - RNA, 21 nt, Artificial Sequence
  source: /note="Description of Artificial Sequence: Synthetic oligonucleotide"
gaaugugaaagucaucgacaa

SEQ ID NO: 161 - RNA, 22 nt, Artificial Sequence
  source: /note="Description of Artificial Sequence: Synthetic oligonucleotide"
  modified_base (1)..(1): Inverted abasic DNA (2-hydroxymethyl-tetrahydrofurane- 5-phosphate)
ngaaugugaaagucaucgacaa

SEQ ID NO: 162 - RNA, 21 nt, Artificial Sequence
  source: /note="Description of Artificial Sequence: Synthetic oligonucleotide"
gaaugugaaagucaucgacaa

SEQ ID NO: 163 - RNA, 21 nt, Artificial Sequence
  source: /note="Description of Artificial Sequence: Synthetic oligonucleotide"
gaaugugaaagucaucgacaa

SEQ ID NO: 164 - RNA, 21 nt, Artificial Sequence
  source: /note="Description of Artificial Sequence: Synthetic oligonucleotide"
gaaugugaaagucaucgacaa

SEQ ID NO: 165 - RNA, 21 nt, Artificial Sequence
  source: /note="Description of Artificial Sequence: Synthetic oligonucleotide"
gaaugugaaagucaucgacaa

SEQ ID NO: 166 - RNA, 21 nt, Artificial Sequence
  source: /note="Description of Artificial Sequence: Synthetic oligonucleotide"
gaaugugaaagucaucgacaa

SEQ ID NO: 167 - RNA, 21 nt, Artificial Sequence
  source: /note="Description of Artificial Sequence: Synthetic oligonucleotide"
gaaugugaaagucaucgacaa

SEQ ID NO: 168 - RNA, 19 nt, Artificial Sequence
  source: /note="Description of Artificial Sequence: Synthetic oligonucleotide"
augugaaagucaucgacaa

SEQ ID NO: 169 - RNA, 19 nt, Artificial Sequence
  source: /note="Description of Artificial Sequence: Synthetic oligonucleotide"
augugaaagucaucgacaa

SEQ ID NO: 170 - RNA, 21 nt, Artificial Sequence
  source: /note="Description of Artificial Sequence: Synthetic oligonucleotide"
gaaugugaaagucaucgacaa

SEQ ID NO: 171 - RNA, 21 nt, Artificial Sequence
  source: /note="Description of Artificial Sequence: Synthetic oligonucleotide"
gaaugugaaagucaucgacaa

SEQ ID NO: 172 - RNA, 21 nt, Artificial Sequence
  source: /note="Description of Artificial Sequence: Synthetic oligonucleotide"
gaaugugaaagucaucgacaa

SEQ ID NO: 173 - RNA, 21 nt, Artificial Sequence
  source: /note="Description of Artificial Sequence: Synthetic oligonucleotide"
gaaugugaaagucaucgacaa

SEQ ID NO: 174 - RNA, 21 nt, Artificial Sequence
  source: /note="Description of Artificial Sequence: Synthetic oligonucleotide"
gaaugugaaagucaucgacaa

SEQ ID NO: 175 - RNA, 21 nt, Artificial Sequence
  source: /note="Description of Artificial Sequence: Synthetic oligonucleotide"
gaaugugaaagucaucgacaa

SEQ ID NO: 176 - RNA, 21 nt, Artificial Sequence
  source: /note="Description of Artificial Sequence: Synthetic oligonucleotide"
gaaugugaaagucaucgacaa

SEQ ID NO: 177 - RNA, 21 nt, Artificial Sequence
  source: /note="Description of Artificial Sequence: Synthetic oligonucleotide"
gaaugugaaagucaucgacaa

SEQ ID NO: 178 - RNA, 21 nt, Artificial Sequence
  source: /note="Description of Artificial Sequence: Synthetic oligonucleotide"
gaaugugaaagucaucgacaa

SEQ ID NO: 179 - RNA, 21 nt, Artificial Sequence
  source: /note="Description of Artificial Sequence: Synthetic oligonucleotide"
gaaugugaaagucaucgacaa

SEQ ID NO: 180 - RNA, 21 nt, Artificial Sequence
  source: /note="Description of Artificial Sequence: Synthetic oligonucleotide"
gaaugugaaagucaucgacaa

SEQ ID NO: 181 - DNA, 21 bp, Artificial Sequence
  source: /note="Description of Artificial Sequence: Synthetic oligonucleotide"
  source: /note="Description of Combined DNA/RNA Molecule: Synthetic oligonucleotide"
gaaugtgaaagucaucgacaa

SEQ ID NO: 182 - DNA, 21 bp, Artificial Sequence
  source: /note="Description of Artificial Sequence: Synthetic oligonucleotide"
  source: /note="Description of Combined DNA/RNA Molecule: Synthetic oligonucleotide"
gaaugugaaagucaucgacaa

SEQ ID NO: 183 - DNA, 21 bp, Artificial Sequence
  source: /note="Description of Artificial Sequence: Synthetic oligonucleotide"
  source: /note="Description of Combined DNA/RNA Molecule: Synthetic oligonucleotide"
gaaugtgaaagucaucgacaa

SEQ ID NO: 184 - DNA, 21 bp, Artificial Sequence
  source: /note="Description of Artificial Sequence: Synthetic oligonucleotide"
  source: /note="Description of Combined DNA/RNA Molecule: Synthetic oligonucleotide"
gaaugugaaagucaucgacaa

SEQ ID NO: 185 - DNA, 21 bp, Artificial Sequence
  source: /note="Description of Artificial Sequence: Synthetic oligonucleotide"
  source: /note="Description of Combined DNA/RNA Molecule: Synthetic oligonucleotide"
gaaugugaaagucaucgacaa

SEQ ID NO: 186 - DNA, 21 bp, Artificial Sequence
  source: /note="Description of Artificial Sequence: Synthetic oligonucleotide"
  source: /note="Description of Combined DNA/RNA Molecule: Synthetic oligonucleotide"
gaaugugaaagucauctacaa

SEQ ID NO: 187 - DNA, 21 bp, Artificial Sequence
  source: /note="Description of Artificial Sequence: Synthetic oligonucleotide"
  source: /note="Description of Combined DNA/RNA Molecule: Synthetic oligonucleotide"
  modified_base (17)..(17): 2-hydroxymethyl-tetrahydrofurane-4-methoxy-3-phosphate (abasic 2'-OMe furanose)
gaaugugaaagucaucnacaa

SEQ ID NO: 188 - DNA, 21 bp, Artificial Sequence
  source: /note="Description of Artificial Sequence: Synthetic oligonucleotide"
  source: /note="Description of Combined DNA/RNA Molecule: Synthetic oligonucleotide"
gaaugugaaagucatctacaa

SEQ ID NO: 189 - DNA, 21 bp, Artificial Sequence
  source: /note="Description of Artificial Sequence: Synthetic oligonucleotide"
  source: /note="Description of Combined DNA/RNA Molecule: Synthetic oligonucleotide"
gaaugugaaagucaucgacaa

SEQ ID NO: 190 - DNA, 21 bp, Artificial Sequence
  source: /note="Description of Artificial Sequence: Synthetic oligonucleotide"
  source: /note="Description of Combined DNA/RNA Molecule: Synthetic oligonucleotide"
gaaugugaaagucauctacaa

SEQ ID NO: 191 - DNA, 21 bp, Artificial Sequence
  source: /note="Description of Artificial Sequence: Synthetic oligonucleotide"
  source: /note="Description of Combined DNA/RNA Molecule: Synthetic oligonucleotide"
  modified_base (17)..(17): 2-hydroxymethyl-tetrahydrofurane-4-methoxy-3-phosphate (abasic 2'-OMe furanose)
gaaugugaaagucaucnacaa

SEQ ID NO: 192 - RNA, 21 nt, Artificial Sequence
  source: /note="Description of Artificial Sequence: Synthetic oligonucleotide"
gaaugugaaagucaucgacaa

SEQ ID NO: 193 - RNA, 21 nt, Artificial Sequence
  source: /note="Description of Artificial Sequence: Synthetic oligonucleotide"
gaaugugaaagucaucgacaa

SEQ ID NO: 194 - RNA, 21 nt, Artificial Sequence
  source: /note="Description of Artificial Sequence: Synthetic oligonucleotide"
gaaugugaaagucaucgacaa

SEQ ID NO: 195 - RNA, 21 nt, Artificial Sequence
  source: /note="Description of Artificial Sequence: Synthetic oligonucleotide"
gaaugugaaagucaucgacaa

SEQ ID NO: 196 - RNA, 21 nt, Artificial Sequence
  source: /note="Description of Artificial Sequence: Synthetic oligonucleotide"
gaaugugaaagucaucgacaa

SEQ ID NO: 197 - RNA, 21 nt, Artificial Sequence
  source: /note="Description of Artificial Sequence: Synthetic oligonucleotide"
gaaugugaaagucaucgacaa

SEQ ID NO: 198 - DNA, 21 bp, Artificial Sequence
  source: /note="Description of Artificial Sequence: Synthetic oligonucleotide"
  source: /note="Description of Combined DNA/RNA Molecule: Synthetic oligonucleotide"
gaaugugaaagucaucgacaa

SEQ ID NO: 199 - RNA, 21 nt, Artificial Sequence
  source: /note="Description of Artificial Sequence: Synthetic oligonucleotide"
gacuuucauccuggaaauaua

SEQ ID NO: 200 - RNA, 21 nt, Artificial Sequence
  source: /note="Description of Artificial Sequence: Synthetic oligonucleotide"
gacuuucauccuggaaauaua

SEQ ID NO: 201 - RNA, 21 nt, Artificial Sequence
  source: /note="Description of Artificial Sequence: Synthetic oligonucleotide"
gacuuucauccuggaaauaua

SEQ ID NO: 202 - RNA, 21 nt, Artificial Sequence
  source: /note="Description of Artificial Sequence: Synthetic oligonucleotide"
gacuuucauccuggaaauaua

SEQ ID NO: 203 - RNA, 21 nt, Artificial Sequence
  source: /note="Description of Artificial Sequence: Synthetic oligonucleotide"
gacuuucauccuggaaauaua

SEQ ID NO: 204 - RNA, 21 nt, Artificial Sequence
  source: /note="Description of Artificial Sequence: Synthetic oligonucleotide"
gacuuucauccuggaaauaua

SEQ ID NO: 205 - RNA, 19 nt, Artificial Sequence
  source: /note="Description of Artificial Sequence: Synthetic oligonucleotide"
cuuucauccuggaaauaua

SEQ ID NO: 206 - RNA, 19 nt, Artificial Sequence
  source: /note="Description of Artificial Sequence: Synthetic oligonucleotide"
cuuucauccuggaaauaua

SEQ ID NO: 207 - RNA, 21 nt, Artificial Sequence
  source: /note="Description of Artificial Sequence: Synthetic oligonucleotide"
gacuuucauccuggaaauaua

SEQ ID NO: 208 - RNA, 21 nt, Artificial Sequence
  source: /note="Description of Artificial Sequence: Synthetic oligonucleotide"
gacuuucauccuggaaauaua

SEQ ID NO: 209 - RNA, 21 nt, Artificial Sequence
  source: /note="Description of Artificial Sequence: Synthetic oligonucleotide"
gacuuucauccuggaaauaua

SEQ ID NO: 210 - RNA, 21 nt, Artificial Sequence
  source: /note="Description of Artificial Sequence: Synthetic oligonucleotide"
gacuuucauccuggaaauaua

SEQ ID NO: 211 - RNA, 21 nt, Artificial Sequence
  source: /note="Description of Artificial Sequence: Synthetic oligonucleotide"
gacuuucauccuggaaauaua

SEQ ID NO: 212 - RNA, 21 nt, Artificial Sequence
  source: /note="Description of Artificial Sequence: Synthetic oligonucleotide"
gacuuucauccuggaaauaua

SEQ ID NO: 213 - RNA, 21 nt, Artificial Sequence
  source: /note="Description of Artificial Sequence: Synthetic oligonucleotide"
gacuuucauccuggaaauaua

SEQ ID NO: 214 - RNA, 21 nt, Artificial Sequence
  source: /note="Description of Artificial Sequence: Synthetic oligonucleotide"
gacuuucauccuggaaauaua

SEQ ID NO: 215 - RNA, 21 nt, Artificial Sequence
  source: /note="Description of Artificial Sequence: Synthetic oligonucleotide"
gacuuucauccuggaaauaua

SEQ ID NO: 216 - RNA, 21 nt, Artificial Sequence
  source: /note="Description of Artificial Sequence: Synthetic oligonucleotide"
gacuuucauccuggaaauaua

SEQ ID NO: 217 - RNA, 21 nt, Artificial Sequence
  source: /note="Description of Artificial Sequence: Synthetic oligonucleotide"
gacuuucauccuggaaauaua

SEQ ID NO: 218 - RNA, 21 nt, Artificial Sequence
  source: /note="Description of Artificial Sequence: Synthetic oligonucleotide"
gacuuucauccuggaaauaua

SEQ ID NO: 219 - DNA, 21 bp, Artificial Sequence
  source: /note="Description of Artificial Sequence: Synthetic oligonucleotide"
  source: /note="Description of Combined DNA/RNA Molecule: Synthetic oligonucleotide"
gacuuucauccuggaaauaua

SEQ ID NO: 220 - DNA, 21 bp, Artificial Sequence
  source: /note="Description of Artificial Sequence: Synthetic oligonucleotide"
  source: /note="Description of Combined DNA/RNA Molecule: Synthetic oligonucleotide"
gacutucauccuggaaauaua

SEQ ID NO: 221 - DNA, 21 bp, Artificial Sequence
  source: /note="Description of Artificial Sequence: Synthetic oligonucleotide"
  source: /note="Description of Combined DNA/RNA Molecule: Synthetic oligonucleotide"
gacuutcauccuggaaauaua

SEQ ID NO: 222 - DNA, 21 bp, Artificial Sequence
  source: /note="Description of Artificial Sequence: Synthetic oligonucleotide"
  source: /note="Description of Combined DNA/RNA Molecule: Synthetic oligonucleotide"
gacuuucauccuggaaauaua

SEQ ID NO: 223 - DNA, 21 bp, Artificial Sequence
  source: /note="Description of Artificial Sequence: Synthetic oligonucleotide"
  source: /note="Description of Combined DNA/RNA Molecule: Synthetic oligonucleotide"
gacuuucauccuggaaauaua

SEQ ID NO: 224 - DNA, 21 bp, Artificial Sequence
  source: /note="Description of Artificial Sequence: Synthetic oligonucleotide"
  source: /note="Description of Combined DNA/RNA Molecule: Synthetic oligonucleotide"
gacuuucauccuggaatuaua

SEQ ID NO: 225 - DNA, 21 bp, Artificial Sequence
  source: /note="Description of Artificial Sequence: Synthetic oligonucleotide"
  source: /note="Description of Combined DNA/RNA Molecule: Synthetic oligonucleotide"
  modified_base (17)..(17): 2-hydroxymethyl-tetrahydrofurane-4-methoxy-3-phosphate (abasic 2'-OMe furanose)
gacuuucauccuggaanuaua

SEQ ID NO: 226 - DNA, 21 bp, Artificial Sequence
  source: /note="Description of Artificial Sequence: Synthetic oligonucleotide"
  source: /note="Description of Combined DNA/RNA Molecule: Synthetic oligonucleotide"
gacuuucauccuggaatuaua

SEQ ID NO: 227 - DNA, 21 bp, Artificial Sequence
  source: /note="Description of Artificial Sequence: Synthetic oligonucleotide"
  source: /note="Description of Combined DNA/RNA Molecule: Synthetic oligonucleotide"
gacuuucauccuggaatuaua

SEQ ID NO: 228 - DNA, 21 bp, Artificial Sequence
  source: /note="Description of Artificial Sequence: Synthetic oligonucleotide"
  source: /note="Description of Combined DNA/RNA Molecule: Synthetic oligonucleotide"
gacuuucauccuggaaauaua

SEQ ID NO: 229 - DNA, 21 bp, Artificial Sequence
  source: /note="Description of Artificial Sequence: Synthetic oligonucleotide"
  source: /note="Description of Combined DNA/RNA Molecule: Synthetic oligonucleotide"
gacuutcauccuggaaauaua

SEQ ID NO: 230 - RNA, 21 nt, Artificial Sequence
  source: /note="Description of Artificial Sequence: Synthetic oligonucleotide"
gacuuucauccuggaaauaua

SEQ ID NO: 231 - RNA, 21 nt, Artificial Sequence
  source: /note="Description of Artificial Sequence: Synthetic oligonucleotide"
gacuuucauccuggaaauaua

SEQ ID NO: 232 - RNA, 21 nt, Artificial Sequence
  source: /note="Description of Artificial Sequence: Synthetic oligonucleotide"
gacuuucauccuggaaauaua

SEQ ID NO: 233 - RNA, 21 nt, Artificial Sequence
  source: /note="Description of Artificial Sequence: Synthetic oligonucleotide"
gacuuucauccuggaaauaua

SEQ ID NO: 234 - RNA, 21 nt, Artificial Sequence
  source: /note="Description of Artificial Sequence: Synthetic oligonucleotide"
gacuuucauccuggaaauaua

SEQ ID NO: 235 - RNA, 21 nt, Artificial Sequence
  source: /note="Description of Artificial Sequence: Synthetic oligonucleotide"
gacuuucauccuggaaauaua

SEQ ID NO: 236 - RNA, 21 nt, Artificial Sequence
  source: /note="Description of Artificial Sequence: Synthetic oligonucleotide"
gacuuucauccuggaaauaua

SEQ ID NO: 237 - DNA, 21 bp, Artificial Sequence
  source: /note="Description of Artificial Sequence: Synthetic oligonucleotide"
  source: /note="Description of Combined DNA/RNA Molecule: Synthetic oligonucleotide"
gacuuucauccuggaaauaua

SEQ ID NO: 238 - RNA, 21 nt, Artificial Sequence
  source: /note="Description of Artificial Sequence: Synthetic oligonucleotide"
agaaagguguucaagauguca

SEQ ID NO: 239 - RNA, 21 nt, Artificial Sequence
  source: /note="Description of Artificial Sequence: Synthetic oligonucleotide"
cauccuggaaauauauuaacu

SEQ ID NO: 240 - RNA, 21 nt, Artificial Sequence
  source: /note="Description of Artificial Sequence: Synthetic oligonucleotide"
gaaugugaaagucaucgacaa

SEQ ID NO: 241 - RNA, 21 nt, Artificial Sequence
  source: /note="Description of Artificial Sequence: Synthetic oligonucleotide"
agugcacaauauuuucccaua

SEQ ID NO: 242 - RNA, 21 nt, Artificial Sequence
  source: /note="Description of Artificial Sequence: Synthetic oligonucleotide"
gaaagucaucgacaagacauu

SEQ ID NO: 243 - RNA, 21 nt, Artificial Sequence
  source: /note="Description of Artificial Sequence: Synthetic oligonucleotide"
aaugugaaagucaucgacaaa

SEQ ID NO: 244 - RNA, 21 nt, Artificial Sequence
  source: /note="Description of Artificial Sequence: Synthetic oligonucleotide"
cuggaaauauauuaacuguua

SEQ ID NO: 245 - RNA, 21 nt, Artificial Sequence
  source: /note="Description of Artificial Sequence: Synthetic oligonucleotide"
auuuucccaucuguauuauuu

SEQ ID NO: 246 - RNA, 21 nt, Artificial Sequence
  source: /note="Description of Artificial Sequence: Synthetic oligonucleotide"
ugucguucuuuuccaacaaaa

SEQ ID NO: 247 - RNA, 21 nt, Artificial Sequence
  source: /note="Description of Artificial Sequence: Synthetic oligonucleotide"
auccuggaaauauauuaacua

SEQ ID NO: 248 - RNA, 21 nt, Artificial Sequence
  source: /note="Description of Artificial Sequence: Synthetic oligonucleotide"
gcauuuugagaggugaugaua

SEQ ID NO: 249 - RNA, 21 nt, Artificial Sequence
  source: /note="Description of Artificial Sequence: Synthetic oligonucleotide"
cagggggagaaagguguucaa

SEQ ID NO: 250 - RNA, 21 nt, Artificial Sequence
  source: /note="Description of Artificial Sequence: Synthetic oligonucleotide"
ggaaauauauuaacuguuaaa

SEQ ID NO: 251 - RNA, 21 nt, Artificial Sequence
  source: /note="Description of Artificial Sequence: Synthetic oligonucleotide"
cauuggugaggaaaaauccuu

SEQ ID NO: 252 - RNA, 21 nt, Artificial Sequence
  source: /note="Description of Artificial Sequence: Synthetic oligonucleotide"
gggagaaagguguucaagaua

SEQ ID NO: 253 - RNA, 21 nt, Artificial Sequence
  source: /note="Description of Artificial Sequence: Synthetic oligonucleotide"
ggcauuuugagaggugaugau

SEQ ID NO: 254 - RNA, 21 nt, Artificial Sequence
  source: /note="Description of Artificial Sequence: Synthetic oligonucleotide"
uacaaagggugucguucuuuu

SEQ ID NO: 255 - RNA, 21 nt, Artificial Sequence
  source: /note="Description of Artificial Sequence: Synthetic oligonucleotide"
ugggaucuuggugucgaauca

SEQ ID NO: 256 - RNA, 21 nt, Artificial Sequence
  source: /note="Description of Artificial Sequence: Synthetic oligonucleotide"
cugacagugcacaauauuuua

SEQ ID NO: 257 - RNA, 21 nt, Artificial Sequence
  source: /note="Description of Artificial Sequence: Synthetic oligonucleotide"
cagugcacaauauuuucccau

SEQ ID NO: 258 - RNA, 21 nt, Artificial Sequence
  source: /note="Description of Artificial Sequence: Synthetic oligonucleotide"
acuuuucaauggguguccuaa

SEQ ID NO: 259 - RNA, 21 nt, Artificial Sequence
  source: /note="Description of Artificial Sequence: Synthetic oligonucleotide"
acauuggugaggaaaaauccu

SEQ ID NO: 260 - RNA, 21 nt, Artificial Sequence
  source: /note="Description of Artificial Sequence: Synthetic oligonucleotide"
uugcuuuugacuuuucaauga

SEQ ID NO: 261 - RNA, 21 nt, Artificial Sequence
  source: /note="Description of Artificial Sequence: Synthetic oligonucleotide"
cauuuugagaggugaugauga

SEQ ID NO: 262 - RNA, 21 nt, Artificial Sequence
  source: /note="Description of Artificial Sequence: Synthetic oligonucleotide"
uugacuuuucaauggguguca

SEQ ID NO: 263 - RNA, 21 nt, Artificial Sequence
  source: /note="Description of Artificial Sequence: Synthetic oligonucleotide"
cgacuucuguuuuaggacaga

SEQ ID NO: 264 - RNA, 21 nt, Artificial Sequence
  source: /note="Description of Artificial Sequence: Synthetic oligonucleotide"
cucugagugggugccagaaua

SEQ ID NO: 265 - RNA, 21 nt, Artificial Sequence
  source: /note="Description of Artificial Sequence: Synthetic oligonucleotide"
gggugccagaaugugaaagua

SEQ ID NO: 266 - RNA, 21 nt, Artificial Sequence
  source: /note="Description of Artificial Sequence: Synthetic oligonucleotide"
ucaauggguguccuaggaaca

SEQ ID NO: 267 - RNA, 21 nt, Artificial Sequence
  source: /note="Description of Artificial Sequence: Synthetic oligonucleotide"
aaagucaucgacaagacauua

SEQ ID NO: 268 - RNA, 21 nt, Artificial Sequence
  source: /note="Description of Artificial Sequence: Synthetic oligonucleotide"
auuuugagaggugaugaugca

SEQ ID NO: 269 - RNA, 21 nt, Artificial Sequence
  source: /note="Description of Artificial Sequence: Synthetic oligonucleotide"
aucgacaagacauuggugaga

SEQ ID NO: 270 - RNA, 21 nt, Artificial Sequence
  source: /note="Description of Artificial Sequence: Synthetic oligonucleotide"
ggugccagaaugugaaaguca

SEQ ID NO: 271 - RNA, 21 nt, Artificial Sequence
  source: /note="Description of Artificial Sequence: Synthetic oligonucleotide"
gacagugcacaauauuuucca

SEQ ID NO: 272 - RNA, 21 nt, Artificial Sequence
  source: /note="Description of Artificial Sequence: Synthetic oligonucleotide"
acaaagagacacugugcagaa

SEQ ID NO: 273 - RNA, 21 nt, Artificial Sequence
  source: /note="Description of Artificial Sequence: Synthetic oligonucleotide"
uuuucaauggguguccuagga

SEQ ID NO: 274 - RNA, 21 nt, Artificial Sequence
  source: /note="Description of Artificial Sequence: Synthetic oligonucleotide"
ccguuuccaagaucugacagu

SEQ ID NO: 275 - RNA, 21 nt, Artificial Sequence
  source: /note="Description of Artificial Sequence: Synthetic oligonucleotide"
agggggagaaagguguucaaa

SEQ ID NO: 276 - RNA, 21 nt, Artificial Sequence
  source: /note="Description of Artificial Sequence: Synthetic oligonucleotide"
agucaucgacaagacauuggu

SEQ ID NO: 277 - RNA, 23 nt, Artificial Sequence
  source: /note="Description of Artificial Sequence: Synthetic oligonucleotide"
uugucgaugacuuucacauucug

SEQ ID NO: 278 - RNA, 23 nt, Artificial Sequence
  source: /note="Description of Artificial Sequence: Synthetic oligonucleotide"
uugucgaugacuuucacauucug

SEQ ID NO: 279 - RNA, 23 nt, Artificial Sequence
  source: /note="Description of Artificial Sequence: Synthetic oligonucleotide"
uugucgaugacuuucacauucug

SEQ ID NO: 280 - RNA, 23 nt, Artificial Sequence
  source: /note="Description of Artificial Sequence: Synthetic oligonucleotide"
uugucgaugacuuucacauucug

SEQ ID NO: 281 - RNA, 23 nt, Artificial Sequence
  source: /note="Description of Artificial Sequence: Synthetic oligonucleotide"
uugucgaugacuuucacauucug

SEQ ID NO: 282 - RNA, 23 nt, Artificial Sequence
  source: /note="Description of Artificial Sequence: Synthetic oligonucleotide"
uugucgaugacuuucacauucug

SEQ ID NO: 283 - RNA, 23 nt, Artificial Sequence
  source: /note="Description of Artificial Sequence: Synthetic oligonucleotide"
uugucgaugacuuucacauucug

SEQ ID NO: 284 - RNA, 23 nt, Artificial Sequence
  source: /note="Description of Artificial Sequence: Synthetic oligonucleotide"
uugucgaugacuuucacauucug

SEQ ID NO: 285 - RNA, 21 nt, Artificial Sequence
  source: /note="Description of Artificial Sequence: Synthetic oligonucleotide"
uugucgaugacuuucacauuc

SEQ ID NO: 286 - RNA, 21 nt, Artificial Sequence
  source: /note="Description of Artificial Sequence: Synthetic oligonucleotide"
uugucgaugacuuucacauuc

SEQ ID NO: 287 - RNA, 23 nt, Artificial Sequence
  source: /note="Description of Artificial Sequence: Synthetic oligonucleotide"
uugucgaugacuuucacauucug

SEQ ID NO: 288 - RNA, 23 nt, Artificial Sequence
  source: /note="Description of Artificial Sequence: Synthetic oligonucleotide"
uugucgaugacuuucacauucug

SEQ ID NO: 289 - RNA, 23 nt, Artificial Sequence
  source: /note="Description of Artificial Sequence: Synthetic oligonucleotide"
uugucgaugacuuucacauucug

SEQ ID NO: 290 - RNA, 23 nt, Artificial Sequence
  source: /note="Description of Artificial Sequence: Synthetic oligonucleotide"
uugucgaugacuuucacauucug

SEQ ID NO: 291 - RNA, 23 nt, Artificial Sequence
  source: /note="Description of Artificial Sequence: Synthetic oligonucleotide"
uugucgaugacuuucacauucug

SEQ ID NO: 292 - RNA, 23 nt, Artificial Sequence
  source: /note="Description of Artificial Sequence: Synthetic oligonucleotide"
uugucgaugacuuucacauucug

SEQ ID NO: 293 - RNA, 23 nt, Artificial Sequence
  source: /note="Description of Artificial Sequence: Synthetic oligonucleotide"
uugucgaugacuuucacauucug

SEQ ID NO: 294 - RNA, 23 nt, Artificial Sequence
  source: /note="Description of Artificial Sequence: Synthetic oligonucleotide"
uugucgaugacuuucacauucug

SEQ ID NO: 295 - RNA, 23 nt, Artificial Sequence
  source: /note="Description of Artificial Sequence: Synthetic oligonucleotide"
uugucgaugacuuucacauucug

SEQ ID NO: 296 - RNA, 23 nt, Artificial Sequence
  source: /note="Description of Artificial Sequence: Synthetic oligonucleotide"
uugucgaugacuuucacauucug

SEQ ID NO: 297 - RNA, 23 nt, Artificial Sequence
  source: /note="Description of Artificial Sequence: Synthetic oligonucleotide"
uugucgaugacuuucacauucug

SEQ ID NO: 298 - RNA, 23 nt, Artificial Sequence
  source: /note="Description of Artificial Sequence: Synthetic oligonucleotide"
uugucgaugacuuucacauucug

SEQ ID NO: 299 - RNA, 23 nt, Artificial Sequence
  source: /note="Description of Artificial Sequence: Synthetic oligonucleotide"
uugucgaugacuuucacauucug

SEQ ID NO: 300 - RNA, 23 nt, Artificial Sequence
  source: /note="Description of Artificial Sequence: Synthetic oligonucleotide"
uugucgaugacuuucacauucug

SEQ ID NO: 301 - RNA, 23 nt, Artificial Sequence
  source: /note="Description of Artificial Sequence: Synthetic oligonucleotide"
uugucgaugacuuucacauucug

SEQ ID NO: 302 - RNA, 23 nt, Artificial Sequence
  source: /note="Description of Artificial Sequence: Synthetic oligonucleotide"
uugucgaugacuuucacauucug

SEQ ID NO: 303 - RNA, 23 nt, Artificial Sequence
  source: /note="Description of Artificial Sequence: Synthetic oligonucleotide"
uugucgaugacuuucacauucug

SEQ ID NO: 304 - RNA, 23 nt, Artificial Sequence
  source: /note="Description of Artificial Sequence: Synthetic oligonucleotide"
uugucgaugacuuucacauucug

SEQ ID NO: 305 - RNA, 23 nt, Artificial Sequence
  source: /note="Description of Artificial Sequence: Synthetic oligonucleotide"
uugucgaugacuuucacauucug

SEQ ID NO: 306 - RNA, 23 nt, Artificial Sequence
  source: /note="Description of Artificial Sequence: Synthetic oligonucleotide"
uugucgaugacuuucacauucug

SEQ ID NO: 307 - RNA, 23 nt, Artificial Sequence
  source: /note="Description of Artificial Sequence: Synthetic oligonucleotide"
uugucgaugacuuucacauucug

SEQ ID NO: 308 - RNA, 23 nt, Artificial Sequence
  source: /note="Description of Artificial Sequence: Synthetic oligonucleotide"
uugucgaugacuuucacauucug

SEQ ID NO: 309 - DNA, 23 bp, Artificial Sequence
  source: /note="Description of Artificial Sequence: Synthetic oligonucleotide"
  source: /note="Description of Combined DNA/RNA Molecule: Synthetic oligonucleotide"
utgucgaugacuutcacauucug

SEQ ID NO: 310 - DNA, 23 bp, Artificial Sequence
  source: /note="Description of Artificial Sequence: Synthetic oligonucleotide"
  source: /note="Description of Combined DNA/RNA Molecule: Synthetic oligonucleotide"
uugucgaugacuutcacauucug

SEQ ID NO: 311 - DNA, 23 bp, Artificial Sequence
  source: /note="Description of Artificial Sequence: Synthetic oligonucleotide"
  source: /note="Description of Combined DNA/RNA Molecule: Synthetic oligonucleotide"
utgucgaugacuutcacauucug

SEQ ID NO: 312 - DNA, 23 bp, Artificial Sequence
  source: /note="Description of Artificial Sequence: Synthetic oligonucleotide"
  source: /note="Description of Combined DNA/RNA Molecule: Synthetic oligonucleotide"
uugucgaugacuutcacauucug

SEQ ID NO: 313 - DNA, 23 bp, Artificial Sequence
  source: /note="Description of Artificial Sequence: Synthetic oligonucleotide"
  source: /note="Description of Combined DNA/RNA Molecule: Synthetic oligonucleotide"
utgucgaugacuutcacauucug

SEQ ID NO: 314 - DNA, 23 bp, Artificial Sequence
  source: /note="Description of Artificial Sequence: Synthetic oligonucleotide"
  source: /note="Description of Combined DNA/RNA Molecule: Synthetic oligonucleotide"
utgucgaugacuutcacauucug

SEQ ID NO: 315 - DNA, 23 bp, Artificial Sequence
  source: /note="Description of Artificial Sequence: Synthetic oligonucleotide"
  source: /note="Description of Combined DNA/RNA Molecule: Synthetic oligonucleotide"
utgucgaugacuutcacauucug

SEQ ID NO: 316 - RNA, 23 nt, Artificial Sequence
  source: /note="Description of Artificial Sequence: Synthetic oligonucleotide"
uauauuuccaggaugaaagucca

SEQ ID NO: 317 - RNA, 23 nt, Artificial Sequence
  source: /note="Description of Artificial Sequence: Synthetic oligonucleotide"
uauauuuccaggaugaaagucca

SEQ ID NO: 318 - RNA, 23 nt, Artificial Sequence
  source: /note="Description of Artificial Sequence: Synthetic oligonucleotide"
uauauuuccaggaugaaagucca

SEQ ID NO: 319 - RNA, 23 nt, Artificial Sequence
  source: /note="Description of Artificial Sequence: Synthetic oligonucleotide"
uauauuuccaggaugaaagucca

SEQ ID NO: 320 - RNA, 23 nt, Artificial Sequence
  source: /note="Description of Artificial Sequence: Synthetic oligonucleotide"
uauauuuccaggaugaaagucca

SEQ ID NO: 321 - RNA, 23 nt, Artificial Sequence
  source: /note="Description of Artificial Sequence: Synthetic oligonucleotide"
uauauuuccaggaugaaagucca

SEQ ID NO: 322 - RNA, 21 nt, Artificial Sequence
  source: /note="Description of Artificial Sequence: Synthetic oligonucleotide"
uauauuuccaggaugaaaguc

SEQ ID NO: 323 - RNA, 21 nt, Artificial Sequence
  source: /note="Description of Artificial Sequence: Synthetic oligonucleotide"
uauauuuccaggaugaaaguc

SEQ ID NO: 324 - RNA, 23 nt, Artificial Sequence
  source: /note="Description of Artificial Sequence: Synthetic oligonucleotide"
uauauuuccaggaugaaagucca

SEQ ID NO: 325 - RNA, 23 nt, Artificial Sequence
  source: /note="Description of Artificial Sequence: Synthetic oligonucleotide"
uauauuuccaggaugaaagucca

SEQ ID NO: 326 - RNA, 23 nt, Artificial Sequence
  source: /note="Description of Artificial Sequence: Synthetic oligonucleotide"
uauauuuccaggaugaaagucca

SEQ ID NO: 327 - RNA, 23 nt, Artificial Sequence
  source: /note="Description of Artificial Sequence: Synthetic oligonucleotide"
uauauuuccaggaugaaagucca

SEQ ID NO: 328 - RNA, 23 nt, Artificial Sequence
  source: /note="Description of Artificial Sequence: Synthetic oligonucleotide"
uauauuuccaggaugaaagucca

SEQ ID NO: 329 - RNA, 23 nt, Artificial Sequence
  source: /note="Description of Artificial Sequence: Synthetic oligonucleotide"
uauauuuccaggaugaaagucca

SEQ ID NO: 330 - RNA, 23 nt, Artificial Sequence
  source: /note="Description of Artificial Sequence: Synthetic oligonucleotide"
uauauuuccaggaugaaagucca

SEQ ID NO: 331 - RNA, 23 nt, Artificial Sequence
  source: /note="Description of Artificial Sequence: Synthetic oligonucleotide"
uauauuuccaggaugaaagucca

SEQ ID NO: 332 - RNA, 23 nt, Artificial Sequence
  source: /note="Description of Artificial Sequence: Synthetic oligonucleotide"
uauauuuccaggaugaaagucca

SEQ ID NO: 333 - RNA, 23 nt, Artificial Sequence
  source: /note="Description of Artificial Sequence: Synthetic oligonucleotide"
uauauuuccaggaugaaagucca

SEQ ID NO: 334 - RNA, 23 nt, Artificial Sequence
  source: /note="Description of Artificial Sequence: Synthetic oligonucleotide"
uauauuuccaggaugaaagucca

SEQ ID NO: 335 - RNA, 23 nt, Artificial Sequence
  source: /note="Description of Artificial Sequence: Synthetic oligonucleotide"
uauauuuccaggaugaaagucca

SEQ ID NO: 336 - RNA, 23 nt, Artificial Sequence
  source: /note="Description of Artificial Sequence: Synthetic oligonucleotide"
uauauuuccaggaugaaagucca

SEQ ID NO: 337 - RNA, 23 nt, Artificial Sequence
  source: /note="Description of Artificial Sequence: Synthetic oligonucleotide"
uauauuuccaggaugaaagucca

SEQ ID NO: 338 - RNA, 23 nt, Artificial Sequence
  source: /note="Description of Artificial Sequence: Synthetic oligonucleotide"
uauauuuccaggaugaaagucca

SEQ ID NO: 339 - RNA, 23 nt, Artificial Sequence
  source: /note="Description of Artificial Sequence: Synthetic oligonucleotide"
uauauuuccaggaugaaagucca

SEQ ID NO: 340 - RNA, 23 nt, Artificial Sequence
  source: /note="Description of Artificial Sequence: Synthetic oligonucleotide"
uauauuuccaggaugaaagucca

SEQ ID NO: 341 - RNA, 23 nt, Artificial Sequence
  source: /note="Description of Artificial Sequence: Synthetic oligonucleotide"
uauauuuccaggaugaaagucca

SEQ ID NO: 342 - RNA, 23 nt, Artificial Sequence
  source: /note="Description of Artificial Sequence: Synthetic oligonucleotide"
uauauuuccaggaugaaagucca

SEQ ID NO: 343 - RNA, 23 nt, Artificial Sequence
  source: /note="Description of Artificial Sequence: Synthetic oligonucleotide"
uauauuuccaggaugaaagucca

SEQ ID NO: 344 - RNA, 23 nt, Artificial Sequence
  source: /note="Description of Artificial Sequence: Synthetic oligonucleotide"
uauauuuccaggaugaaagucca

SEQ ID NO: 345 - RNA, 23 nt, Artificial Sequence
  source: /note="Description of Artificial Sequence: Synthetic oligonucleotide"
uauauuuccaggaugaaagucca

SEQ ID NO: 346 - RNA, 23 nt, Artificial Sequence
  source: /note="Description of Artificial Sequence: Synthetic oligonucleotide"
uauauuuccaggaugaaagucca

SEQ ID NO: 347 - DNA, 23 bp, Artificial Sequence
  source: /note="Description of Artificial Sequence: Synthetic oligonucleotide"
  source: /note="Description of Combined DNA/RNA Molecule: Synthetic oligonucleotide"
uauauuuccaggatgaaagucca

SEQ ID NO: 348 - DNA, 23 bp, Artificial Sequence
  source: /note="Description of Artificial Sequence: Synthetic oligonucleotide"
  source: /note="Description of Combined DNA/RNA Molecule: Synthetic oligonucleotide"
uauauuuccaggatgaaagucca

SEQ ID NO: 349 - DNA, 23 bp, Artificial Sequence
  source: /note="Description of Artificial Sequence: Synthetic oligonucleotide"
  source: /note="Description of Combined DNA/RNA Molecule: Synthetic oligonucleotide"
uauauuuccaggatgaaagucca

SEQ ID NO: 350 - DNA, 23 bp, Artificial Sequence
  source: /note="Description of Artificial Sequence: Synthetic oligonucleotide"
  source: /note="Description of Combined DNA/RNA Molecule: Synthetic oligonucleotide"
uauautuccaggatgaaagucca

SEQ ID NO: 351 - DNA, 23 bp, Artificial Sequence
  source: /note="Description of Artificial Sequence: Synthetic oligonucleotide"
  source: /note="Description of Combined DNA/RNA Molecule: Synthetic oligonucleotide"
uauautuccaggatgaaagucca

SEQ ID NO: 352 - DNA, 23 bp, Artificial Sequence
  source: /note="Description of Artificial Sequence: Synthetic oligonucleotide"
  source: /note="Description of Combined DNA/RNA Molecule: Synthetic oligonucleotide"
uauauuuccaggatgaaagucca

SEQ ID NO: 353 - DNA, 23 bp, Artificial Sequence
  source: /note="Description of Artificial Sequence: Synthetic oligonucleotide"
  source: /note="Description of Combined DNA/RNA Molecule: Synthetic oligonucleotide"
uauautuccaggatgaaagucca

SEQ ID NO: 354 - DNA, 23 bp, Artificial Sequence
  source: /note="Description of Artificial Sequence: Synthetic oligonucleotide"
  source: /note="Description of Combined DNA/RNA Molecule: Synthetic oligonucleotide"
uauauuuccaggatgaaagucca

SEQ ID NO: 355 - RNA, 23 nt, Artificial Sequence
  source: /note="Description of Artificial Sequence: Synthetic oligonucleotide"
ugacaucuugaacaccuuucucc

SEQ ID NO: 356 - RNA, 23 nt, Artificial Sequence
  source: /note="Description of Artificial Sequence: Synthetic oligonucleotide"
aguuaauauauuuccaggaugaa

SEQ ID NO: 357 - RNA, 23 nt, Artificial Sequence
  source: /note="Description of Artificial Sequence: Synthetic oligonucleotide"
uugucgaugacuuucacauucug

SEQ ID NO: 358 - RNA, 23 nt, Artificial Sequence
  source: /note="Description of Artificial Sequence: Synthetic oligonucleotide"
uaugggaaaauauugugcacugu

SEQ ID NO: 359 - RNA, 23 nt, Artificial Sequence
  source: /note="Description of Artificial Sequence: Synthetic oligonucleotide"
aaugucuugucgaugacuuucac

SEQ ID NO: 360 - RNA, 23 nt, Artificial Sequence
  source: /note="Description of Artificial Sequence: Synthetic oligonucleotide"
uuugucgaugacuuucacauucu

SEQ ID NO: 361 - RNA, 23 nt, Artificial Sequence
  source: /note="Description of Artificial Sequence: Synthetic oligonucleotide"
uaacaguuaauauauuuccagga

SEQ ID NO: 362 - RNA, 23 nt, Artificial Sequence
  source: /note="Description of Artificial Sequence: Synthetic oligonucleotide"
aaauaauacagaugggaaaauau

SEQ ID NO: 363 - RNA, 23 nt, Artificial Sequence
  source: /note="Description of Artificial Sequence: Synthetic oligonucleotide"
uuuuguuggaaaagaacgacacc

SEQ ID NO: 364 - RNA, 23 nt, Artificial Sequence
  source: /note="Description of Artificial Sequence: Synthetic oligonucleotide"
uaguuaauauauuuccaggauga

SEQ ID NO: 365 - RNA, 23 nt, Artificial Sequence
  source: /note="Description of Artificial Sequence: Synthetic oligonucleotide"
uaucaucaccucucaaaaugccc

SEQ ID NO: 366 - RNA, 23 nt, Artificial Sequence
  source: /note="Description of Artificial Sequence: Synthetic oligonucleotide"
uugaacaccuuucucccccugga

SEQ ID NO: 367 - RNA, 23 nt, Artificial Sequence
  source: /note="Description of Artificial Sequence: Synthetic oligonucleotide"
uuuaacaguuaauauauuuccag

SEQ ID NO: 368 - RNA, 23 nt, Artificial Sequence
  source: /note="Description of Artificial Sequence: Synthetic oligonucleotide"
aaggauuuuuccucaccaauguc

SEQ ID NO: 369 - RNA, 23 nt, Artificial Sequence
  source: /note="Description of Artificial Sequence: Synthetic oligonucleotide"
uaucuugaacaccuuucuccccc

SEQ ID NO: 370 - RNA, 23 nt, Artificial Sequence
  source: /note="Description of Artificial Sequence: Synthetic oligonucleotide"
aucaucaccucucaaaaugcccu

SEQ ID NO: 371 - RNA, 23 nt, Artificial Sequence
  source: /note="Description of Artificial Sequence: Synthetic oligonucleotide"
aaaagaacgacacccuuuguauu

SEQ ID NO: 372 - RNA, 23 nt, Artificial Sequence
  source: /note="Description of Artificial Sequence: Synthetic oligonucleotide"
ugauucgacaccaagaucccauu

SEQ ID NO: 373 - RNA, 23 nt, Artificial Sequence
  source: /note="Description of Artificial Sequence: Synthetic oligonucleotide"
uaaaauauugugcacugucagau

SEQ ID NO: 374 - RNA, 23 nt, Artificial Sequence
  source: /note="Description of Artificial Sequence: Synthetic oligonucleotide"
augggaaaauauugugcacuguc

SEQ ID NO: 375 - RNA, 23 nt, Artificial Sequence
  source: /note="Description of Artificial Sequence: Synthetic oligonucleotide"
uuaggacacccauugaaaaguca

SEQ ID NO: 376 - RNA, 23 nt, Artificial Sequence
  source: /note="Description of Artificial Sequence: Synthetic oligonucleotide"
aggauuuuuccucaccaaugucu

SEQ ID NO: 377 - RNA, 23 nt, Artificial Sequence
  source: /note="Description of Artificial Sequence: Synthetic oligonucleotide"
ucauugaaaagucaaaagcaaug

SEQ ID NO: 378 - RNA, 23 nt, Artificial Sequence
  source: /note="Description of Artificial Sequence: Synthetic oligonucleotide"
ucaucaucaccucucaaaaugcc

SEQ ID NO: 379 - RNA, 23 nt, Artificial Sequence
  source: /note="Description of Artificial Sequence: Synthetic oligonucleotide"
ugacacccauugaaaagucaaaa

SEQ ID NO: 380 - RNA, 23 nt, Artificial Sequence
  source: /note="Description of Artificial Sequence: Synthetic oligonucleotide"
ucuguccuaaaacagaagucgac

SEQ ID NO: 381 - RNA, 23 nt, Artificial Sequence
  source: /note="Description of Artificial Sequence: Synthetic oligonucleotide"
uauucuggcacccacucagagcc

SEQ ID NO: 382 - RNA, 23 nt, Artificial Sequence
  source: /note="Description of Artificial Sequence: Synthetic oligonucleotide"
uacuuucacauucuggcacccac

SEQ ID NO: 383 - RNA, 23 nt, Artificial Sequence
  source: /note="Description of Artificial Sequence: Synthetic oligonucleotide"
uguuccuaggacacccauugaaa

SEQ ID NO: 384 - RNA, 23 nt, Artificial Sequence
  source: /note="Description of Artificial Sequence: Synthetic oligonucleotide"
uaaugucuugucgaugacuuuca

SEQ ID NO: 385 - RNA, 23 nt, Artificial Sequence
  source: /note="Description of Artificial Sequence: Synthetic oligonucleotide"
ugcaucaucaccucucaaaaugc

SEQ ID NO: 386 - RNA, 23 nt, Artificial Sequence
  source: /note="Description of Artificial Sequence: Synthetic oligonucleotide"
ucucaccaaugucuugucgauga

SEQ ID NO: 387 - RNA, 23 nt, Artificial Sequence
  source: /note="Description of Artificial Sequence: Synthetic oligonucleotide"
ugacuuucacauucuggcaccca

SEQ ID NO: 388 - RNA, 23 nt, Artificial Sequence
  source: /note="Description of Artificial Sequence: Synthetic oligonucleotide"
uggaaaauauugugcacugucag

SEQ ID NO: 389 - RNA, 23 nt, Artificial Sequence
  source: /note="Description of Artificial Sequence: Synthetic oligonucleotide"
uucugcacagugucucuuuguca

SEQ ID NO: 390 - RNA, 23 nt, Artificial Sequence
  source: /note="Description of Artificial Sequence: Synthetic oligonucleotide"
uccuaggacacccauugaaaagu

SEQ ID NO: 391 - RNA, 23 nt, Artificial Sequence
  source: /note="Description of Artificial Sequence: Synthetic oligonucleotide"
acugucagaucuuggaaacggcc

SEQ ID NO: 392 - RNA, 23 nt, Artificial Sequence
  source: /note="Description of Artificial Sequence: Synthetic oligonucleotide"
uuugaacaccuuucucccccugg

SEQ ID NO: 393 - RNA, 23 nt, Artificial Sequence
  source: /note="Description of Artificial Sequence: Synthetic oligonucleotide"
accaaugucuugucgaugacuuu

SEQ ID NO: 394 - RNA, 21 nt, Artificial Sequence
  source: /note="Description of Artificial Sequence: Synthetic oligonucleotide"
gaaugugaaagucaucgacaa

SEQ ID NO: 395 - RNA, 21 nt, Artificial Sequence
  source: /note="Description of Artificial Sequence: Synthetic oligonucleotide"
uuuucaauggguguccuagga

SEQ ID NO: 396 - RNA, 21 nt, Artificial Sequence
  source: /note="Description of Artificial Sequence: Synthetic oligonucleotide"
gaaagucaucgacaagacauu

SEQ ID NO: 397 - RNA, 21 nt, Artificial Sequence
  source: /note="Description of Artificial Sequence: Synthetic oligonucleotide"
ucaucgacaagacauugguga

SEQ ID NO: 398 - RNA, 21 nt, Artificial Sequence
  source: /note="Description of Artificial Sequence: Synthetic oligonucleotide"
uuucaauggguguccuaggaa

SEQ ID NO: 399 - RNA, 21 nt, Artificial Sequence
  source: /note="Description of Artificial Sequence: Synthetic oligonucleotide"
aauggguguccuaggaaccuu

SEQ ID NO: 400 - RNA, 21 nt, Artificial Sequence
  source: /note="Description of Artificial Sequence: Synthetic oligonucleotide"
gacagugcacaauauuuucca

SEQ ID NO: 401 - RNA, 21 nt, Artificial Sequence
  source: /note="Description of Artificial Sequence: Synthetic oligonucleotide"
acuuuucaauggguguccuaa

SEQ ID NO: 402 - RNA, 21 nt, Artificial Sequence
  source: /note="Description of Artificial Sequence: Synthetic oligonucleotide"
aagucaucgacaagacauuga

SEQ ID NO: 403 - RNA, 21 nt, Artificial Sequence
  source: /note="Description of Artificial Sequence: Synthetic oligonucleotide"
aucgacaagacauuggugaga

SEQ ID NO: 404 - RNA, 21 nt, Artificial Sequence
  source: /note="Description of Artificial Sequence: Synthetic oligonucleotide"
gggagaaagguguucaagaua

SEQ ID NO: 405 - RNA, 21 nt, Artificial Sequence
  source: /note="Description of Artificial Sequence: Synthetic oligonucleotide"
cuuuucaauggguguccuaga

SEQ ID NO: 406 - RNA, 21 nt, Artificial Sequence
  source: /note="Description of Artificial Sequence: Synthetic oligonucleotide"
ucaauggguguccuaggaaca

SEQ ID NO: 407 - RNA, 21 nt, Artificial Sequence
  source: /note="Description of Artificial Sequence: Synthetic oligonucleotide"
uugacuuuucaauggguguca

SEQ ID NO: 408 - RNA, 21 nt, Artificial Sequence
  source: /note="Description of Artificial Sequence: Synthetic oligonucleotide"
aaagucaucgacaagacauua

SEQ ID NO: 409 - RNA, 21 nt, Artificial Sequence
  source: /note="Description of Artificial Sequence: Synthetic oligonucleotide"
cagggggagaaagguguucaa

SEQ ID NO: 410 - RNA, 21 nt, Artificial Sequence
  source: /note="Description of Artificial Sequence: Synthetic oligonucleotide"
cauuggugaggaaaaauccuu

SEQ ID NO: 411 - RNA, 21 nt, Artificial Sequence
  source: /note="Description of Artificial Sequence: Synthetic oligonucleotide"
acauuggugaggaaaaauccu

SEQ ID NO: 412 - RNA, 21 nt, Artificial Sequence
  source: /note="Description of Artificial Sequence: Synthetic oligonucleotide"
agggggagaaagguguucaaa

SEQ ID NO: 413 - RNA, 21 nt, Artificial Sequence
  source: /note="Description of Artificial Sequence: Synthetic oligonucleotide"
cucaggaugaaaaauuuugaa

SEQ ID NO: 414 - RNA, 21 nt, Artificial Sequence
  source: /note="Description of Artificial Sequence: Synthetic oligonucleotide"
cagcauguauuacuugacaaa

SEQ ID NO: 415 - RNA, 21 nt, Artificial Sequence
  source: /note="Description of Artificial Sequence: Synthetic oligonucleotide"
uaugaacaacaugcuaaauca

SEQ ID NO: 416 - RNA, 21 nt, Artificial Sequence
  source: /note="Description of Artificial Sequence: Synthetic oligonucleotide"
auauauccaaauguuuuagga

SEQ ID NO: 417 - RNA, 21 nt, Artificial Sequence
  source: /note="Description of Artificial Sequence: Synthetic oligonucleotide"
ccagauggaagcuguauccaa

SEQ ID NO: 418 - RNA, 21 nt, Artificial Sequence
  source: /note="Description of Artificial Sequence: Synthetic oligonucleotide"
gacuuucauccuggaaauaua

SEQ ID NO: 419 - RNA, 21 nt, Artificial Sequence
  source: /note="Description of Artificial Sequence: Synthetic oligonucleotide"
ccccggcuaauuuguaucaau

SEQ ID NO: 420 - RNA, 21 nt, Artificial Sequence
  source: /note="Description of Artificial Sequence: Synthetic oligonucleotide"
uuaaacauggcuugaauggga

SEQ ID NO: 421 - RNA, 21 nt, Artificial Sequence
  source: /note="Description of Artificial Sequence: Synthetic oligonucleotide"
aauguguuuagacaacgucau

SEQ ID NO: 422 - RNA, 21 nt, Artificial Sequence
  source: /note="Description of Artificial Sequence: Synthetic oligonucleotide"
acuaaaggaagaauuccgguu

SEQ ID NO: 423 - RNA, 21 nt, Artificial Sequence
  source: /note="Description of Artificial Sequence: Synthetic oligonucleotide"
uauauccaaauguuuuaggau

SEQ ID NO: 424 - RNA, 21 nt, Artificial Sequence
  source: /note="Description of Artificial Sequence: Synthetic oligonucleotide"
gugcggaaaggcacugauguu

SEQ ID NO: 425 - RNA, 21 nt, Artificial Sequence
  source: /note="Description of Artificial Sequence: Synthetic oligonucleotide"
uaaaacagugguucuuaaauu

SEQ ID NO: 426 - RNA, 21 nt, Artificial Sequence
  source: /note="Description of Artificial Sequence: Synthetic oligonucleotide"
augaaaaauuuugaaaccagu

SEQ ID NO: 427 - RNA, 21 nt, Artificial Sequence
  source: /note="Description of Artificial Sequence: Synthetic oligonucleotide"
aacaaaauagcaaucccuuuu

SEQ ID NO: 428 - RNA, 21 nt, Artificial Sequence
  source: /note="Description of Artificial Sequence: Synthetic oligonucleotide"
cugaaacagaucugucgacuu

SEQ ID NO: 429 - RNA, 21 nt, Artificial Sequence
  source: /note="Description of Artificial Sequence: Synthetic oligonucleotide"
uuguugcaaagggcauuuuga

SEQ ID NO: 430 - RNA, 21 nt, Artificial Sequence
  source: /note="Description of Artificial Sequence: Synthetic oligonucleotide"
cucauuguuuauuaaccugua

SEQ ID NO: 431 - RNA, 21 nt, Artificial Sequence
  source: /note="Description of Artificial Sequence: Synthetic oligonucleotide"
caacaaaauagcaaucccuuu

SEQ ID NO: 432 - RNA, 21 nt, Artificial Sequence
  source: /note="Description of Artificial Sequence: Synthetic oligonucleotide"
cauuguuuauuaaccuguauu

SEQ ID NO: 433 - RNA, 21 nt, Artificial Sequence
  source: /note="Description of Artificial Sequence: Synthetic oligonucleotide"
uaucagcugggaagauaucaa

SEQ ID NO: 434 - RNA, 21 nt, Artificial Sequence
  source: /note="Description of Artificial Sequence: Synthetic oligonucleotide"
uguccuaggaaccuuuuagaa

SEQ ID NO: 435 - RNA, 21 nt, Artificial Sequence
  source: /note="Description of Artificial Sequence: Synthetic oligonucleotide"
uccaacaaaauagcaaucccu

SEQ ID NO: 436 - RNA, 21 nt, Artificial Sequence
  source: /note="Description of Artificial Sequence: Synthetic oligonucleotide"
ggugugcggaaaggcacugau

SEQ ID NO: 437 - RNA, 21 nt, Artificial Sequence
  source: /note="Description of Artificial Sequence: Synthetic oligonucleotide"
uugaaaccaguacuuuaucau

SEQ ID NO: 438 - RNA, 21 nt, Artificial Sequence
  source: /note="Description of Artificial Sequence: Synthetic oligonucleotide"
uacuuccaaagucuauauaua

SEQ ID NO: 439 - RNA, 21 nt, Artificial Sequence
  source: /note="Description of Artificial Sequence: Synthetic oligonucleotide"
uccuaggaaccuuuuagaaau

SEQ ID NO: 440 - RNA, 21 nt, Artificial Sequence
  source: /note="Description of Artificial Sequence: Synthetic oligonucleotide"
cuccugaggaaaauuuuggaa

SEQ ID NO: 441 - RNA, 21 nt, Artificial Sequence
  source: /note="Description of Artificial Sequence: Synthetic oligonucleotide"
gcuccggaauguugcugaaau

SEQ ID NO: 442 - RNA, 21 nt, Artificial Sequence
  source: /note="Description of Artificial Sequence: Synthetic oligonucleotide"
guguuuguggggagaccaaua

SEQ ID NO: 443 - RNA, 23 nt, Artificial Sequence
  source: /note="Description of Artificial Sequence: Synthetic oligonucleotide"
uugucgaugacuuucacauucug

SEQ ID NO: 444 - RNA, 23 nt, Artificial Sequence
  source: /note="Description of Artificial Sequence: Synthetic oligonucleotide"
uccuaggacacccauugaaaagu

SEQ ID NO: 445 - RNA, 23 nt, Artificial Sequence
  source: /note="Description of Artificial Sequence: Synthetic oligonucleotide"
aaugucuugucgaugacuuucac

SEQ ID NO: 446 - RNA, 23 nt, Artificial Sequence
  source: /note="Description of Artificial Sequence: Synthetic oligonucleotide"
ucaccaaugucuugucgaugacu

SEQ ID NO: 447 - RNA, 23 nt, Artificial Sequence
  source: /note="Description of Artificial Sequence: Synthetic oligonucleotide"
uuccuaggacacccauugaaaag

SEQ ID NO: 448 - RNA, 23 nt, Artificial Sequence
  source: /note="Description of Artificial Sequence: Synthetic oligonucleotide"
aagguuccuaggacacccauuga

SEQ ID NO: 449 - RNA, 23 nt, Artificial Sequence
  source: /note="Description of Artificial Sequence: Synthetic oligonucleotide"
uggaaaauauugugcacugucag

SEQ ID NO: 450 - RNA, 23 nt, Artificial Sequence
  source: /note="Description of Artificial Sequence: Synthetic oligonucleotide"
uuaggacacccauugaaaaguca

SEQ ID NO: 451 - RNA, 23 nt, Artificial Sequence
  source: /note="Description of Artificial Sequence: Synthetic oligonucleotide"
ucaaugucuugucgaugacuuuc

SEQ ID NO: 452 - RNA, 23 nt, Artificial Sequence
  source: /note="Description of Artificial Sequence: Synthetic oligonucleotide"
ucucaccaaugucuugucgauga

SEQ ID NO: 453 - RNA, 23 nt, Artificial Sequence
  source: /note="Description of Artificial Sequence: Synthetic oligonucleotide"
uaucuugaacaccuuucuccccc

SEQ ID NO: 454 - RNA, 23 nt, Artificial Sequence
  source: /note="Description of Artificial Sequence: Synthetic oligonucleotide"
ucuaggacacccauugaaaaguc

SEQ ID NO: 455 - RNA, 23 nt, Artificial Sequence
  source: /note="Description of Artificial Sequence: Synthetic oligonucleotide"
uguuccuaggacacccauugaaa

SEQ ID NO: 456 - RNA, 23 nt, Artificial Sequence
  source: /note="Description of Artificial Sequence: Synthetic oligonucleotide"
ugacacccauugaaaagucaaaa

SEQ ID NO: 457 - RNA, 23 nt, Artificial Sequence
  source: /note="Description of Artificial Sequence: Synthetic oligonucleotide"
uaaugucuugucgaugacuuuca

SEQ ID NO: 458 - RNA, 23 nt, Artificial Sequence
  source: /note="Description of Artificial Sequence: Synthetic oligonucleotide"
uugaacaccuuucucccccugga

SEQ ID NO: 459 - RNA, 23 nt, Artificial Sequence
  source: /note="Description of Artificial Sequence: Synthetic oligonucleotide"
aaggauuuuuccucaccaauguc

SEQ ID NO: 460 - RNA, 23 nt, Artificial Sequence
  source: /note="Description of Artificial Sequence: Synthetic oligonucleotide"
aggauuuuuccucaccaaugucu

SEQ ID NO: 461 - RNA, 23 nt, Artificial Sequence
  source: /note="Description of Artificial Sequence: Synthetic oligonucleotide"
uuugaacaccuuucucccccugg

SEQ ID NO: 462 - RNA, 23 nt, Artificial Sequence
  source: /note="Description of Artificial Sequence: Synthetic oligonucleotide"
uucaaaauuuuucauccugaguu

SEQ ID NO: 463 - RNA, 23 nt, Artificial Sequence
  source: /note="Description of Artificial Sequence: Synthetic oligonucleotide"
uuugucaaguaauacaugcugaa

SEQ ID NO: 464 - RNA, 23 nt, Artificial Sequence
  source: /note="Description of Artificial Sequence: Synthetic oligonucleotide"
ugauuuagcauguuguucauaau

SEQ ID NO: 465 - RNA, 23 nt, Artificial Sequence
  source: /note="Description of Artificial Sequence: Synthetic oligonucleotide"
uccuaaaacauuuggauauauuc

SEQ ID NO: 466 - RNA, 23 nt, Artificial Sequence
  source: /note="Description of Artificial Sequence: Synthetic oligonucleotide"
uuggauacagcuuccaucuggaa

SEQ ID NO: 467 - RNA, 23 nt, Artificial Sequence
  source: /note="Description of Artificial Sequence: Synthetic oligonucleotide"
uauauuuccaggaugaaagucca

SEQ ID NO: 468 - RNA, 23 nt, Artificial Sequence
  source: /note="Description of Artificial Sequence: Synthetic oligonucleotide"
auugauacaaauuagccggggga

SEQ ID NO: 469 - RNA, 23 nt, Artificial Sequence
  source: /note="Description of Artificial Sequence: Synthetic oligonucleotide"
ucccauucaagccauguuuaaca

SEQ ID NO: 470 - RNA, 23 nt, Artificial Sequence
  source: /note="Description of Artificial Sequence: Synthetic oligonucleotide"
augacguugucuaaacacauuuu

SEQ ID NO: 471 - RNA, 23 nt, Artificial Sequence
  source: /note="Description of Artificial Sequence: Synthetic oligonucleotide"
aaccggaauucuuccuuuaguau

SEQ ID NO: 472 - RNA, 23 nt, Artificial Sequence
  source: /note="Description of Artificial Sequence: Synthetic oligonucleotide"
auccuaaaacauuuggauauauu

SEQ ID NO: 473 - RNA, 23 nt, Artificial Sequence
  source: /note="Description of Artificial Sequence: Synthetic oligonucleotide"
aacaucagugccuuuccgcacac

SEQ ID NO: 474 - RNA, 23 nt, Artificial Sequence
  source: /note="Description of Artificial Sequence: Synthetic oligonucleotide"
aauuuaagaaccacuguuuuaaa

SEQ ID NO: 475 - RNA, 23 nt, Artificial Sequence
  source: /note="Description of Artificial Sequence: Synthetic oligonucleotide"
acugguuucaaaauuuuucaucc

SEQ ID NO: 476 - RNA, 23 nt, Artificial Sequence
  source: /note="Description of Artificial Sequence: Synthetic oligonucleotide"
aaaagggauugcuauuuuguugg

SEQ ID NO: 477 - RNA, 23 nt, Artificial Sequence
  source: /note="Description of Artificial Sequence: Synthetic oligonucleotide"
aagucgacagaucuguuucagca

SEQ ID NO: 478 - RNA, 23 nt, Artificial Sequence
  source: /note="Description of Artificial Sequence: Synthetic oligonucleotide"
ucaaaaugcccuuugcaacaauu

SEQ ID NO: 479 - RNA, 23 nt, Artificial Sequence
  source: /note="Description of Artificial Sequence: Synthetic oligonucleotide"
uacagguuaauaaacaaugagau

SEQ ID NO: 480 - RNA, 23 nt, Artificial Sequence
  source: /note="Description of Artificial Sequence: Synthetic oligonucleotide"
aaagggauugcuauuuuguugga

SEQ ID NO: 481 - RNA, 23 nt, Artificial Sequence
  source: /note="Description of Artificial Sequence: Synthetic oligonucleotide"
aauacagguuaauaaacaaugag

SEQ ID NO: 482 - RNA, 23 nt, Artificial Sequence
  source: /note="Description of Artificial Sequence: Synthetic oligonucleotide"
uugauaucuucccagcugauaga

SEQ ID NO: 483 - RNA, 23 nt, Artificial Sequence
  source: /note="Description of Artificial Sequence: Synthetic oligonucleotide"
uucuaaaagguuccuaggacacc

SEQ ID NO: 484 - RNA, 23 nt, Artificial Sequence
  source: /note="Description of Artificial Sequence: Synthetic oligonucleotide"
agggauugcuauuuuguuggaaa

SEQ ID NO: 485 - RNA, 23 nt, Artificial Sequence
  source: /note="Description of Artificial Sequence: Synthetic oligonucleotide"
aucagugccuuuccgcacacccc

SEQ ID NO: 486 - RNA, 23 nt, Artificial Sequence
  source: /note="Description of Artificial Sequence: Synthetic oligonucleotide"
augauaaaguacugguuucaaaa

SEQ ID NO: 487 - RNA, 23 nt, Artificial Sequence
  source: /note="Description of Artificial Sequence: Synthetic oligonucleotide"
uauauauagacuuuggaaguacu

SEQ ID NO: 488 - RNA, 23 nt, Artificial Sequence
  source: /note="Description of Artificial Sequence: Synthetic oligonucleotide"
auuucuaaaagguuccuaggaca

SEQ ID NO: 489 - RNA, 23 nt, Artificial Sequence
  source: /note="Description of Artificial Sequence: Synthetic oligonucleotide"
uuccaaaauuuuccucaggagaa

SEQ ID NO: 490 - RNA, 23 nt, Artificial Sequence
  source: /note="Description of Artificial Sequence: Synthetic oligonucleotide"
auuucagcaacauuccggagcau

SEQ ID NO: 491 - RNA, 23 nt, Artificial Sequence
  source: /note="Description of Artificial Sequence: Synthetic oligonucleotide"
uauuggucuccccacaaacacag

SEQ ID NO: 492 - RNA, 21 nt, Artificial Sequence
  source: /note="Description of Artificial Sequence: Synthetic oligonucleotide"
auggugguaauuugugauuuu

SEQ ID NO: 493 - RNA, 21 nt, Artificial Sequence
  source: /note="Description of Artificial Sequence: Synthetic oligonucleotide"
gacuugcauccuggaaauaua

SEQ ID NO: 494 - RNA, 21 nt, Artificial Sequence
  source: /note="Description of Artificial Sequence: Synthetic oligonucleotide"
ggaagggaagguagaagucuu

SEQ ID NO: 495 - RNA, 21 nt, Artificial Sequence
  source: /note="Description of Artificial Sequence: Synthetic oligonucleotide"
ugucuucuguuuagauuuccu

SEQ ID NO: 496 - RNA, 21 nt, Artificial Sequence
  source: /note="Description of Artificial Sequence: Synthetic oligonucleotide"
cuuuggcuguuuccaagaucu

SEQ ID NO: 497 - RNA, 21 nt, Artificial Sequence
  source: /note="Description of Artificial Sequence: Synthetic oligonucleotide"
aauguguuugggcaacgucau

SEQ ID NO: 498 - RNA, 21 nt, Artificial Sequence
  source: /note="Description of Artificial Sequence: Synthetic oligonucleotide"
ugugacuguggacaccccuua

SEQ ID NO: 499 - RNA, 21 nt, Artificial Sequence
  source: /note="Description of Artificial Sequence: Synthetic oligonucleotide"
gauggggugccagcuacuauu

SEQ ID NO: 500 - RNA, 21 nt, Artificial Sequence
  source: /note="Description of Artificial Sequence: Synthetic oligonucleotide"
gaaaauguguuugggcaacgu

SEQ ID NO: 501 - RNA, 21 nt, Artificial Sequence
  source: /note="Description of Artificial Sequence: Synthetic oligonucleotide"
ggcuguuuccaagaucugaca

SEQ ID NO: 502 - RNA, 21 nt, Artificial Sequence
  source: /note="Description of Artificial Sequence: Synthetic oligonucleotide"
uccaacaaaauagccaccccu

SEQ ID NO: 503 - RNA, 21 nt, Artificial Sequence
  source: /note="Description of Artificial Sequence: Synthetic oligonucleotide"
gucuucuguuuagauuuccuu

SEQ ID NO: 504 - RNA, 21 nt, Artificial Sequence
  source: /note="Description of Artificial Sequence: Synthetic oligonucleotide"
uggaagggaagguagaagucu

SEQ ID NO: 505 - RNA, 21 nt, Artificial Sequence
  source: /note="Description of Artificial Sequence: Synthetic oligonucleotide"
uccuuuggcuguuuccaagau

SEQ ID NO: 506 - RNA, 21 nt, Artificial Sequence
  source: /note="Description of Artificial Sequence: Synthetic oligonucleotide"
caucucucagcugggaugaua

SEQ ID NO: 507 - RNA, 21 nt, Artificial Sequence
  source: /note="Description of Artificial Sequence: Synthetic oligonucleotide"
ggggugccagcuacuauugau

SEQ ID NO: 508 - RNA, 21 nt, Artificial Sequence
  source: /note="Description of Artificial Sequence: Synthetic oligonucleotide"
auguguuugggcaacgucaua

SEQ ID NO: 509 - RNA, 21 nt, Artificial Sequence
  source: /note="Description of Artificial Sequence: Synthetic oligonucleotide"
cuguuuagauuuccuuaagaa

SEQ ID NO: 510 - RNA, 21 nt, Artificial Sequence
  source: /note="Description of Artificial Sequence: Synthetic oligonucleotide"
agaaagaaauggacuugcaua

SEQ ID NO: 511 - RNA, 21 nt, Artificial Sequence
  source: /note="Description of Artificial Sequence: Synthetic oligonucleotide"
gcauccuggaaauauauuaaa

SEQ ID NO: 512 - RNA, 21 nt, Artificial Sequence
  source: /note="Description of Artificial Sequence: Synthetic oligonucleotide"
ccugucagaccaugggaacua

SEQ ID NO: 513 - RNA, 21 nt, Artificial Sequence
  source: /note="Description of Artificial Sequence: Synthetic oligonucleotide"
aaacaugguguggaugggaua

SEQ ID NO: 514 - RNA, 23 nt, Artificial Sequence
  source: /note="Description of Artificial Sequence: Synthetic oligonucleotide"
aaaaucacaaauuaccaccaucc

SEQ ID NO: 515 - RNA, 23 nt, Artificial Sequence
  source: /note="Description of Artificial Sequence: Synthetic oligonucleotide"
uauauuuccaggaugcaagucca

SEQ ID NO: 516 - RNA, 23 nt, Artificial Sequence
  source: /note="Description of Artificial Sequence: Synthetic oligonucleotide"
aagacuucuaccuucccuuccac

SEQ ID NO: 517 - RNA, 23 nt, Artificial Sequence
  source: /note="Description of Artificial Sequence: Synthetic oligonucleotide"
aggaaaucuaaacagaagacagg

SEQ ID NO: 518 - RNA, 23 nt, Artificial Sequence
  source: /note="Description of Artificial Sequence: Synthetic oligonucleotide"
agaucuuggaaacagccaaagga

SEQ ID NO: 519 - RNA, 23 nt, Artificial Sequence
  source: /note="Description of Artificial Sequence: Synthetic oligonucleotide"
augacguugcccaaacacauuuu

SEQ ID NO: 520 - RNA, 23 nt, Artificial Sequence
  source: /note="Description of Artificial Sequence: Synthetic oligonucleotide"
uaagggguguccacagucacaaa

SEQ ID NO: 521 - RNA, 23 nt, Artificial Sequence
  source: /note="Description of Artificial Sequence: Synthetic oligonucleotide"
aauaguagcuggcaccccaucca

SEQ ID NO: 522 - RNA, 23 nt, Artificial Sequence
  source: /note="Description of Artificial Sequence: Synthetic oligonucleotide"
acguugcccaaacacauuuucaa

SEQ ID NO: 523 - RNA, 23 nt, Artificial Sequence
  source: /note="Description of Artificial Sequence: Synthetic oligonucleotide"
ugucagaucuuggaaacagccaa

SEQ ID NO: 524 - RNA, 23 nt, Artificial Sequence
  source: /note="Description of Artificial Sequence: Synthetic oligonucleotide"
agggguggcuauuuuguuggaaa

SEQ ID NO: 525 - RNA, 23 nt, Artificial Sequence
  source: /note="Description of Artificial Sequence: Synthetic oligonucleotide"
aaggaaaucuaaacagaagacag

SEQ ID NO: 526 - RNA, 23 nt, Artificial Sequence
  source: /note="Description of Artificial Sequence: Synthetic oligonucleotide"
agacuucuaccuucccuuccaca

SEQ ID NO: 527 - RNA, 23 nt, Artificial Sequence
  source: /note="Description of Artificial Sequence: Synthetic oligonucleotide"
aucuuggaaacagccaaaggauu

SEQ ID NO: 528 - RNA, 23 nt, Artificial Sequence
  source: /note="Description of Artificial Sequence: Synthetic oligonucleotide"
uaucaucccagcugagagauggg

SEQ ID NO: 529 - RNA, 23 nt, Artificial Sequence
  source: /note="Description of Artificial Sequence: Synthetic oligonucleotide"
aucaauaguagcuggcaccccau

SEQ ID NO: 530 - RNA, 23 nt, Artificial Sequence
  source: /note="Description of Artificial Sequence: Synthetic oligonucleotide"
uaugacguugcccaaacacauuu

SEQ ID NO: 531 - RNA, 23 nt, Artificial Sequence
  source: /note="Description of Artificial Sequence: Synthetic oligonucleotide"
uucuuaaggaaaucuaaacagaa

SEQ ID NO: 532 - RNA, 23 nt, Artificial Sequence
  source: /note="Description of Artificial Sequence: Synthetic oligonucleotide"
uaugcaaguccauuucuuucuag

SEQ ID NO: 533 - RNA, 23 nt, Artificial Sequence
  source: /note="Description of Artificial Sequence: Synthetic oligonucleotide"
uuuaauauauuuccaggaugcaa

SEQ ID NO: 534 - RNA, 23 nt, Artificial Sequence
  source: /note="Description of Artificial Sequence: Synthetic oligonucleotide"
uaguucccauggucugacaggcu

SEQ ID NO: 535 - RNA, 23 nt, Artificial Sequence
  source: /note="Description of Artificial Sequence: Synthetic oligonucleotide"
uaucccauccacaccauguuuaa

SEQ ID NO: 536 - RNA, 21 nt, Artificial Sequence
  source: /note="Description of Artificial Sequence: Synthetic oligonucleotide"
gaaugugaaagucaucgacaa

SEQ ID NO: 537 - RNA, 21 nt, Artificial Sequence
  source: /note="Description of Artificial Sequence: Synthetic oligonucleotide"
gaaugugaaagucaucgacaa

SEQ ID NO: 538 - RNA, 21 nt, Artificial Sequence
  source: /note="Description of Artificial Sequence: Synthetic oligonucleotide"
gaaugugaaagucaucgacaa

SEQ ID NO: 539 - RNA, 21 nt, Artificial Sequence
  source: /note="Description of Artificial Sequence: Synthetic oligonucleotide"
gaaugugaaagucaucgacaa

SEQ ID NO: 540 - RNA, 21 nt, Artificial Sequence
  source: /note="Description of Artificial Sequence: Synthetic oligonucleotide"
gaaugugaaagucaucgacaa

SEQ ID NO: 541 - RNA, 21 nt, Artificial Sequence
  source: /note="Description of Artificial Sequence: Synthetic oligonucleotide"
gaaugugaaagucaucgacaa

SEQ ID NO: 542 - RNA, 21 nt, Artificial Sequence
  source: /note="Description of Artificial Sequence: Synthetic oligonucleotide"
gaaugugaaagucaucgacaa

SEQ ID NO: 543 - RNA, 21 nt, Artificial Sequence
  source: /note="Description of Artificial Sequence: Synthetic oligonucleotide"
gaaugugaaagucaucgacaa

SEQ ID NO: 544 - RNA, 19 nt, Artificial Sequence
  source: /note="Description of Artificial Sequence: Synthetic oligonucleotide"
augugaaagucaucgacaa

SEQ ID NO: 545 - RNA, 19 nt, Artificial Sequence
  source: /note="Description of Artificial Sequence: Synthetic oligonucleotide"
augugaaagucaucgacaa

SEQ ID NO: 546 - RNA, 21 nt, Artificial Sequence
  source: /note="Description of Artificial Sequence: Synthetic oligonucleotide"
gaaugugaaagucaucgacaa

SEQ ID NO: 547 - RNA, 21 nt, Artificial Sequence
  source: /note="Description of Artificial Sequence: Synthetic oligonucleotide"
gaaugugaaagucaucgacaa

SEQ ID NO: 548 - RNA, 21 nt, Artificial Sequence
  source: /note="Description of Artificial Sequence: Synthetic oligonucleotide"
gaaugugaaagucaucgacaa

SEQ ID NO: 549 - RNA, 21 nt, Artificial Sequence
  source: /note="Description of Artificial Sequence: Synthetic oligonucleotide"
gaaugugaaagucaucgacaa

SEQ ID NO: 550 - RNA, 21 nt, Artificial Sequence
  source: /note="Description of Artificial Sequence: Synthetic oligonucleotide"
gaaugugaaagucaucgacaa

SEQ ID NO: 551 - RNA, 21 nt, Artificial Sequence
  source: /note="Description of Artificial Sequence: Synthetic oligonucleotide"
gaaugugaaagucaucgacaa

SEQ ID NO: 552 - RNA, 21 nt, Artificial Sequence
  source: /note="Description of Artificial Sequence: Synthetic oligonucleotide"
gaaugugaaagucaucgacaa

SEQ ID NO: 553 - RNA, 21 nt, Artificial Sequence
  source: /note="Description of Artificial Sequence: Synthetic oligonucleotide"
gaaugugaaagucaucgacaa

SEQ ID NO: 554 - RNA, 21 nt, Artificial Sequence
  source: /note="Description of Artificial Sequence: Synthetic oligonucleotide"
gaaugugaaagucaucgacaa

SEQ ID NO: 555 - RNA, 21 nt, Artificial Sequence
  source: /note="Description of Artificial Sequence: Synthetic oligonucleotide"
gaaugugaaagucaucgacaa

SEQ ID NO: 556 - RNA, 21 nt, Artificial Sequence
  source: /note="Description of Artificial Sequence: Synthetic oligonucleotide"
gaaugugaaagucaucgacaa

SEQ ID NO: 557 - DNA, 21 bp, Artificial Sequence
  source: /note="Description of Artificial Sequence: Synthetic oligonucleotide"
  source: /note="Description of Combined DNA/RNA Molecule: Synthetic oligonucleotide"
gaaugtgaaagucaucgacaa

SEQ ID NO: 558 - RNA, 21 nt, Artificial Sequence
  source: /note="Description of Artificial Sequence: Synthetic oligonucleotide"
gaaugugaaagucaucgacaa

SEQ ID NO: 559 - DNA, 21 bp, Artificial Sequence
  source: /note="Description of Artificial Sequence: Synthetic oligonucleotide"
  source: /note="Description of Combined DNA/RNA Molecule: Synthetic oligonucleotide"
gaaugtgaaagucaucgacaa

SEQ ID NO: 560 - RNA, 21 nt, Artificial Sequence
  source: /note="Description of Artificial Sequence: Synthetic oligonucleotide"
gaaugugaaagucaucgacaa

SEQ ID NO: 561 - RNA, 21 nt, Artificial Sequence
  source: /note="Description of Artificial Sequence: Synthetic oligonucleotide"
gaaugugaaagucaucgacaa

SEQ ID NO: 562 - DNA, 21 bp, Artificial Sequence
  source: /note="Description of Artificial Sequence: Synthetic oligonucleotide"
  source: /note="Description of Combined DNA/RNA Molecule: Synthetic oligonucleotide"
gaaugugaaagucauctacaa

SEQ ID NO: 563 - RNA, 20 nt, Artificial Sequence
  source: /note="Description of Artificial Sequence: Synthetic oligonucleotide"
gaaugugaaagucaucacaa

SEQ ID NO: 564 - DNA, 21 bp, Artificial Sequence
  source: /note="Description of Artificial Sequence: Synthetic oligonucleotide"
  source: /note="Description of Combined DNA/RNA Molecule: Synthetic oligonucleotide"
gaaugugaaagucatctacaa

SEQ ID NO: 565 - RNA, 21 nt, Artificial Sequence
  source: /note="Description of Artificial Sequence: Synthetic oligonucleotide"
gaaugugaaagucaucgacaa

SEQ ID NO: 566 - DNA, 21 bp, Artificial Sequence
  source: /note="Description of Artificial Sequence: Synthetic oligonucleotide"
  source: /note="Description of Combined DNA/RNA Molecule: Synthetic oligonucleotide"
gaaugugaaagucauctacaa

SEQ ID NO: 567 - RNA, 20 nt, Artificial Sequence
  source: /note="Description of Artificial Sequence: Synthetic oligonucleotide"
gaaugugaaagucaucacaa

SEQ ID NO: 568 - RNA, 21 nt, Artificial Sequence
  source: /note="Description of Artificial Sequence: Synthetic oligonucleotide"
gaaugugaaagucaucgacaa

SEQ ID NO: 569 - RNA, 21 nt, Artificial Sequence
  source: /note="Description of Artificial Sequence: Synthetic oligonucleotide"
gaaugugaaagucaucgacaa

SEQ ID NO: 570 - RNA, 21 nt, Artificial Sequence
  source: /note="Description of Artificial Sequence: Synthetic oligonucleotide"
gaaugugaaagucaucgacaa

SEQ ID NO: 571 - RNA, 21 nt, Artificial Sequence
  source: /note="Description of Artificial Sequence: Synthetic oligonucleotide"
gaaugugaaagucaucgacaa

SEQ ID NO: 572 - RNA, 21 nt, Artificial Sequence
  source: /note="Description of Artificial Sequence: Synthetic oligonucleotide"
gaaugugaaagucaucgacaa

SEQ ID NO: 573 - RNA, 21 nt, Artificial Sequence
  source: /note="Description of Artificial Sequence: Synthetic oligonucleotide"
gaaugugaaagucaucgacaa

SEQ ID NO: 574 - RNA, 21 nt, Artificial Sequence
  source: /note="Description of Artificial Sequence: Synthetic oligonucleotide"
gaaugugaaagucaucgacaa

SEQ ID NO: 575 - RNA, 21 nt, Artificial Sequence
  source: /note="Description of Artificial Sequence: Synthetic oligonucleotide"
gacuuucauccuggaaauaua

SEQ ID NO: 576 - RNA, 21 nt, Artificial Sequence
  source: /note="Description of Artificial Sequence: Synthetic oligonucleotide"
gacuuucauccuggaaauaua

SEQ ID NO: 577 - RNA, 21 nt, Artificial Sequence
  source: /note="Description of Artificial Sequence: Synthetic oligonucleotide"
gacuuucauccuggaaauaua

SEQ ID NO: 578 - RNA, 21 nt, Artificial Sequence
  source: /note="Description of Artificial Sequence: Synthetic oligonucleotide"
gacuuucauccuggaaauaua

SEQ ID NO: 579 - RNA, 21 nt, Artificial Sequence
  source: /note="Description of Artificial Sequence: Synthetic oligonucleotide"
gacuuucauccuggaaauaua

SEQ ID NO: 580 - RNA, 21 nt, Artificial Sequence
  source: /note="Description of Artificial Sequence: Synthetic oligonucleotide"
gacuuucauccuggaaauaua

SEQ ID NO: 581 - RNA, 19 nt, Artificial Sequence
  source: /note="Description of Artificial Sequence: Synthetic oligonucleotide"
cuuucauccuggaaauaua

SEQ ID NO: 582 - RNA, 19 nt, Artificial Sequence
  source: /note="Description of Artificial Sequence: Synthetic oligonucleotide"
cuuucauccuggaaauaua

SEQ ID NO: 583 - RNA, 21 nt, Artificial Sequence
  source: /note="Description of Artificial Sequence: Synthetic oligonucleotide"
gacuuucauccuggaaauaua

SEQ ID NO: 584 - RNA, 21 nt, Artificial Sequence
  source: /note="Description of Artificial Sequence: Synthetic oligonucleotide"
gacuuucauccuggaaauaua

SEQ ID NO: 585 - RNA, 21 nt, Artificial Sequence
  source: /note="Description of Artificial Sequence: Synthetic oligonucleotide"
gacuuucauccuggaaauaua

SEQ ID NO: 586 - RNA, 21 nt, Artificial Sequence
  source: /note="Description of Artificial Sequence: Synthetic oligonucleotide"
gacuuucauccuggaaauaua

SEQ ID NO: 587 - RNA, 21 nt, Artificial Sequence
  source: /note="Description of Artificial Sequence: Synthetic oligonucleotide"
gacuuucauccuggaaauaua

SEQ ID NO: 588 - RNA, 21 nt, Artificial Sequence
  source: /note="Description of Artificial Sequence: Synthetic oligonucleotide"
gacuuucauccuggaaauaua

SEQ ID NO: 589 - RNA, 21 nt, Artificial Sequence
  source: /note="Description of Artificial Sequence: Synthetic oligonucleotide"
gacuuucauccuggaaauaua

SEQ ID NO: 590 - RNA, 21 nt, Artificial Sequence
  source: /note="Description of Artificial Sequence: Synthetic oligonucleotide"
gacuuucauccuggaaauaua

SEQ ID NO: 591 - RNA, 21 nt, Artificial Sequence
  source: /note="Description of Artificial Sequence: Synthetic oligonucleotide"
gacuuucauccuggaaauaua

SEQ ID NO: 592 - RNA, 21 nt, Artificial Sequence
  source: /note="Description of Artificial Sequence: Synthetic oligonucleotide"
gacuuucauccuggaaauaua

SEQ ID NO: 593 - RNA, 21 nt, Artificial Sequence
  source: /note="Description of Artificial Sequence: Synthetic oligonucleotide"
gacuuucauccuggaaauaua

SEQ ID NO: 594 - RNA, 21 nt, Artificial Sequence
  source: /note="Description of Artificial Sequence: Synthetic oligonucleotide"
gacuuucauccuggaaauaua

SEQ ID NO: 595 - RNA, 21 nt, Artificial Sequence
  source: /note="Description of Artificial Sequence: Synthetic oligonucleotide"
gacuuucauccuggaaauaua

SEQ ID NO: 596 - DNA, 21 bp, Artificial Sequence
  source: /note="Description of Artificial Sequence: Synthetic oligonucleotide"
  source: /note="Description of Combined DNA/RNA Molecule: Synthetic oligonucleotide"
gacutucauccuggaaauaua

SEQ ID NO: 597 - DNA, 21 bp, Artificial Sequence
  source: /note="Description of Artificial Sequence: Synthetic oligonucleotide"
  source: /note="Description of Combined DNA/RNA Molecule: Synthetic oligonucleotide"
gacuutcauccuggaaauaua

SEQ ID NO: 598 - RNA, 21 nt, Artificial Sequence
  source: /note="Description of Artificial Sequence: Synthetic oligonucleotide"
gacuuucauccuggaaauaua

SEQ ID NO: 599 - RNA, 21 nt, Artificial Sequence
  source: /note="Description of Artificial Sequence: Synthetic oligonucleotide"
gacuuucauccuggaaauaua

SEQ ID NO: 600 - DNA, 21 bp, Artificial Sequence
  source: /note="Description of Artificial Sequence: Synthetic oligonucleotide"
  source: /note="Description of Combined DNA/RNA Molecule: Synthetic oligonucleotide"
gacuuucauccuggaatuaua

SEQ ID NO: 601 - RNA, 20 nt, Artificial Sequence
  source: /note="Description of Artificial Sequence: Synthetic oligonucleotide"
gacuuucauccuggaauaua

SEQ ID NO: 602 - DNA, 21 bp, Artificial Sequence
  source: /note="Description of Artificial Sequence: Synthetic oligonucleotide"
  source: /note="Description of Combined DNA/RNA Molecule: Synthetic oligonucleotide"
gacuuucauccuggaatuaua

SEQ ID NO: 603 - DNA, 21 bp, Artificial Sequence
  source: /note="Description of Artificial Sequence: Synthetic oligonucleotide"
  source: /note="Description of Combined DNA/RNA Molecule: Synthetic oligonucleotide"
gacuuucauccuggaatuaua

SEQ ID NO: 604 - RNA, 21 nt, Artificial Sequence
  source: /note="Description of Artificial Sequence: Synthetic oligonucleotide"
gacuuucauccuggaaauaua

SEQ ID NO: 605 - DNA, 21 bp, Artificial Sequence
  source: /note="Description of Artificial Sequence: Synthetic oligonucleotide"
  source: /note="Description of Combined DNA/RNA Molecule: Synthetic oligonucleotide"
gacuutcauccuggaaauaua

SEQ ID NO: 606 - RNA, 21 nt, Artificial Sequence
  source: /note="Description of Artificial Sequence: Synthetic oligonucleotide"
gacuuucauccuggaaauaua

SEQ ID NO: 607 - RNA, 21 nt, Artificial Sequence
  source: /note="Description of Artificial Sequence: Synthetic oligonucleotide"
gacuuucauccuggaaauaua

SEQ ID NO: 608 - RNA, 21 nt, Artificial Sequence
  source: /note="Description of Artificial Sequence: Synthetic oligonucleotide"
gacuuucauccuggaaauaua

SEQ ID NO: 609 - RNA, 21 nt, Artificial Sequence
  source: /note="Description of Artificial Sequence: Synthetic oligonucleotide"
gacuuucauccuggaaauaua

SEQ ID NO: 610 - RNA, 21 nt, Artificial Sequence
  source: /note="Description of Artificial Sequence: Synthetic oligonucleotide"
gacuuucauccuggaaauaua

SEQ ID NO: 611 - RNA, 21 nt, Artificial Sequence
  source: /note="Description of Artificial Sequence: Synthetic oligonucleotide"
gacuuucauccuggaaauaua

SEQ ID NO: 612 - RNA, 21 nt, Artificial Sequence
  source: /note="Description of Artificial Sequence: Synthetic oligonucleotide"
gacuuucauccuggaaauaua

SEQ ID NO: 613 - RNA, 21 nt, Artificial Sequence
  source: /note="Description of Artificial Sequence: Synthetic oligonucleotide"
gacuuucauccuggaaauaua

SEQ ID NO: 614 - RNA, 21 nt, Artificial Sequence
  source: /note="Description of Artificial Sequence: Synthetic oligonucleotide"
agaaagguguucaagauguca

SEQ ID NO: 615 - RNA, 21 nt, Artificial Sequence
  source: /note="Description of Artificial Sequence: Synthetic oligonucleotide"
cauccuggaaauauauuaacu

SEQ ID NO: 616 - RNA, 21 nt, Artificial Sequence
  source: /note="Description of Artificial Sequence: Synthetic oligonucleotide"
gaaugugaaagucaucgacaa

SEQ ID NO: 617 - RNA, 21 nt, Artificial Sequence
  source: /note="Description of Artificial Sequence: Synthetic oligonucleotide"
agugcacaauauuuucccaua

SEQ ID NO: 618 - RNA, 21 nt, Artificial Sequence
  source: /note="Description of Artificial Sequence: Synthetic oligonucleotide"
gaaagucaucgacaagacauu

SEQ ID NO: 619 - RNA, 21 nt, Artificial Sequence
  source: /note="Description of Artificial Sequence: Synthetic oligonucleotide"
aaugugaaagucaucgacaaa

SEQ ID NO: 620 - RNA, 21 nt, Artificial Sequence
  source: /note="Description of Artificial Sequence: Synthetic oligonucleotide"
cuggaaauauauuaacuguua

SEQ ID NO: 621 - RNA, 21 nt, Artificial Sequence
  source: /note="Description of Artificial Sequence: Synthetic oligonucleotide"
auuuucccaucuguauuauuu

SEQ ID NO: 622 - RNA, 21 nt, Artificial Sequence
  source: /note="Description of Artificial Sequence: Synthetic oligonucleotide"
ugucguucuuuuccaacaaaa

SEQ ID NO: 623 - RNA, 21 nt, Artificial Sequence
  source: /note="Description of Artificial Sequence: Synthetic oligonucleotide"
auccuggaaauauauuaacua

SEQ ID NO: 624 - RNA, 21 nt, Artificial Sequence
  source: /note="Description of Artificial Sequence: Synthetic oligonucleotide"
gcauuuugagaggugaugaua

SEQ ID NO: 625 - RNA, 21 nt, Artificial Sequence
  source: /note="Description of Artificial Sequence: Synthetic oligonucleotide"
cagggggagaaagguguucaa

SEQ ID NO: 626 - RNA, 21 nt, Artificial Sequence
  source: /note="Description of Artificial Sequence: Synthetic oligonucleotide"
ggaaauauauuaacuguuaaa

SEQ ID NO: 627 - RNA, 21 nt, Artificial Sequence
  source: /note="Description of Artificial Sequence: Synthetic oligonucleotide"
cauuggugaggaaaaauccuu

SEQ ID NO: 628 - RNA, 21 nt, Artificial Sequence
  source: /note="Description of Artificial Sequence: Synthetic oligonucleotide"
gggagaaagguguucaagaua

SEQ ID NO: 629 - RNA, 21 nt, Artificial Sequence
  source: /note="Description of Artificial Sequence: Synthetic oligonucleotide"
ggcauuuugagaggugaugau

SEQ ID NO: 630 - RNA, 21 nt, Artificial Sequence
  source: /note="Description of Artificial Sequence: Synthetic oligonucleotide"
uacaaagggugucguucuuuu

SEQ ID NO: 631 - RNA, 21 nt, Artificial Sequence
  source: /note="Description of Artificial Sequence: Synthetic oligonucleotide"
ugggaucuuggugucgaauca

SEQ ID NO: 632 - RNA, 21 nt, Artificial Sequence
  source: /note="Description of Artificial Sequence: Synthetic oligonucleotide"
cugacagugcacaauauuuua

SEQ ID NO: 633 - RNA, 21 nt, Artificial Sequence
  source: /note="Description of Artificial Sequence: Synthetic oligonucleotide"
cagugcacaauauuuucccau

SEQ ID NO: 634 - RNA, 21 nt, Artificial Sequence
  source: /note="Description of Artificial Sequence: Synthetic oligonucleotide"
acuuuucaauggguguccuaa

SEQ ID NO: 635 - RNA, 21 nt, Artificial Sequence
  source: /note="Description of Artificial Sequence: Synthetic oligonucleotide"
acauuggugaggaaaaauccu

SEQ ID NO: 636 - RNA, 21 nt, Artificial Sequence
  source: /note="Description of Artificial Sequence: Synthetic oligonucleotide"
uugcuuuugacuuuucaauga

SEQ ID NO: 637 - RNA, 21 nt, Artificial Sequence
  source: /note="Description of Artificial Sequence: Synthetic oligonucleotide"
cauuuugagaggugaugauga

SEQ ID NO: 638 - RNA, 21 nt, Artificial Sequence
  source: /note="Description of Artificial Sequence: Synthetic oligonucleotide"
uugacuuuucaauggguguca

SEQ ID NO: 639 - RNA, 21 nt, Artificial Sequence
  source: /note="Description of Artificial Sequence: Synthetic oligonucleotide"
cgacuucuguuuuaggacaga

SEQ ID NO: 640 - RNA, 21 nt, Artificial Sequence
  source: /note="Description of Artificial Sequence: Synthetic oligonucleotide"
cucugagugggugccagaaua

SEQ ID NO: 641 - RNA, 21 nt, Artificial Sequence
  source: /note="Description of Artificial Sequence: Synthetic oligonucleotide"
gggugccagaaugugaaagua

SEQ ID NO: 642 - RNA, 21 nt, Artificial Sequence
  source: /note="Description of Artificial Sequence: Synthetic oligonucleotide"
ucaauggguguccuaggaaca

SEQ ID NO: 643 - RNA, 21 nt, Artificial Sequence
  source: /note="Description of Artificial Sequence: Synthetic oligonucleotide"
aaagucaucgacaagacauua

SEQ ID NO: 644 - RNA, 21 nt, Artificial Sequence
  source: /note="Description of Artificial Sequence: Synthetic oligonucleotide"
auuuugagaggugaugaugca

SEQ ID NO: 645 - RNA, 21 nt, Artificial Sequence
  source: /note="Description of Artificial Sequence: Synthetic oligonucleotide"
aucgacaagacauuggugaga

SEQ ID NO: 646 - RNA, 21 nt, Artificial Sequence
  source: /note="Description of Artificial Sequence: Synthetic oligonucleotide"
ggugccagaaugugaaaguca

SEQ ID NO: 647 - RNA, 21 nt, Artificial Sequence
  source: /note="Description of Artificial Sequence: Synthetic oligonucleotide"
gacagugcacaauauuuucca

SEQ ID NO: 648 - RNA, 21 nt, Artificial Sequence
  source: /note="Description of Artificial Sequence: Synthetic oligonucleotide"
acaaagagacacugugcagaa

SEQ ID NO: 649 - RNA, 21 nt, Artificial Sequence
  source: /note="Description of Artificial Sequence: Synthetic oligonucleotide"
uuuucaauggguguccuagga

SEQ ID NO: 650 - RNA, 21 nt, Artificial Sequence
  source: /note="Description of Artificial Sequence: Synthetic oligonucleotide"
ccguuuccaagaucugacagu

SEQ ID NO: 651 - RNA, 21 nt, Artificial Sequence
  source: /note="Description of Artificial Sequence: Synthetic oligonucleotide"
agggggagaaagguguucaaa

SEQ ID NO: 652 - RNA, 21 nt, Artificial Sequence
  source: /note="Description of Artificial Sequence: Synthetic oligonucleotide"
agucaucgacaagacauuggu

SEQ ID NO: 653 - RNA, 23 nt, Artificial Sequence
  source: /note="Description of Artificial Sequence: Synthetic oligonucleotide"
uugucgaugacuuucacauucug

SEQ ID NO: 654 - RNA, 23 nt, Artificial Sequence
  source: /note="Description of Artificial Sequence: Synthetic oligonucleotide"
uugucgaugacuuucacauucug

SEQ ID NO: 655 - RNA, 23 nt, Artificial Sequence
  source: /note="Description of Artificial Sequence: Synthetic oligonucleotide"
uugucgaugacuuucacauucug

SEQ ID NO: 656 - RNA, 23 nt, Artificial Sequence
  source: /note="Description of Artificial Sequence: Synthetic oligonucleotide"
uugucgaugacuuucacauucug

SEQ ID NO: 657 - RNA, 23 nt, Artificial Sequence
  source: /note="Description of Artificial Sequence: Synthetic oligonucleotide"
uugucgaugacuuucacauucug

SEQ ID NO: 658 - RNA, 23 nt, Artificial Sequence
  source: /note="Description of Artificial Sequence: Synthetic oligonucleotide"
uugucgaugacuuucacauucug

SEQ ID NO: 659 - RNA, 23 nt, Artificial Sequence
  source: /note="Description of Artificial Sequence: Synthetic oligonucleotide"
uugucgaugacuuucacauucug

SEQ ID NO: 660 - RNA, 23 nt, Artificial Sequence
  source: /note="Description of Artificial Sequence: Synthetic oligonucleotide"
uugucgaugacuuucacauucug

SEQ ID NO: 661 - RNA, 21 nt, Artificial Sequence
  source: /note="Description of Artificial Sequence: Synthetic oligonucleotide"
uugucgaugacuuucacauuc

SEQ ID NO: 662 - RNA, 21 nt, Artificial Sequence
  source: /note="Description of Artificial Sequence: Synthetic oligonucleotide"
uugucgaugacuuucacauuc

SEQ ID NO: 663 - RNA, 23 nt, Artificial Sequence
  source: /note="Description of Artificial Sequence: Synthetic oligonucleotide"
uugucgaugacuuucacauucug

SEQ ID NO: 664 - RNA, 23 nt, Artificial Sequence
  source: /note="Description of Artificial Sequence: Synthetic oligonucleotide"
uugucgaugacuuucacauucug

SEQ ID NO: 665 - RNA, 23 nt, Artificial Sequence
  source: /note="Description of Artificial Sequence: Synthetic oligonucleotide"
uugucgaugacuuucacauucug

SEQ ID NO: 666 - RNA, 23 nt, Artificial Sequence
  source: /note="Description of Artificial Sequence: Synthetic oligonucleotide"
uugucgaugacuuucacauucug

SEQ ID NO: 667 - RNA, 23 nt, Artificial Sequence
  source: /note="Description of Artificial Sequence: Synthetic oligonucleotide"
uugucgaugacuuucacauucug

SEQ ID NO: 668 - RNA, 23 nt, Artificial Sequence
  source: /note="Description of Artificial Sequence: Synthetic oligonucleotide"
uugucgaugacuuucacauucug

SEQ ID NO: 669 - RNA, 23 nt, Artificial Sequence
  source: /note="Description of Artificial Sequence: Synthetic oligonucleotide"
uugucgaugacuuucacauucug

SEQ ID NO: 670 - RNA, 23 nt, Artificial Sequence
  source: /note="Description of Artificial Sequence: Synthetic oligonucleotide"
uugucgaugacuuucacauucug

SEQ ID NO: 671 - RNA, 23 nt, Artificial Sequence
  source: /note="Description of Artificial Sequence: Synthetic oligonucleotide"
uugucgaugacuuucacauucug

SEQ ID NO: 672 - RNA, 23 nt, Artificial Sequence
  source: /note="Description of Artificial Sequence: Synthetic oligonucleotide"
uugucgaugacuuucacauucug

SEQ ID NO: 673 - RNA, 23 nt, Artificial Sequence
  source: /note="Description of Artificial Sequence: Synthetic oligonucleotide"
uugucgaugacuuucacauucug

SEQ ID NO: 674 - RNA, 23 nt, Artificial Sequence
  source: /note="Description of Artificial Sequence: Synthetic oligonucleotide"
uugucgaugacuuucacauucug

SEQ ID NO: 675 - RNA, 23 nt, Artificial Sequence
  source: /note="Description of Artificial Sequence: Synthetic oligonucleotide"
uugucgaugacuuucacauucug

SEQ ID NO: 676 - RNA, 23 nt, Artificial Sequence
  source: /note="Description of Artificial Sequence: Synthetic oligonucleotide"
uugucgaugacuuucacauucug

SEQ ID NO: 677 - RNA, 23 nt, Artificial Sequence
  source: /note="Description of Artificial Sequence: Synthetic oligonucleotide"
uugucgaugacuuucacauucug

SEQ ID NO: 678 - RNA, 23 nt, Artificial Sequence
  source: /note="Description of Artificial Sequence: Synthetic oligonucleotide"
uugucgaugacuuucacauucug

SEQ ID NO: 679 - RNA, 23 nt, Artificial Sequence
  source: /note="Description of Artificial Sequence: Synthetic oligonucleotide"
uugucgaugacuuucacauucug

SEQ ID NO: 680 - RNA, 23 nt, Artificial Sequence
  source: /note="Description of Artificial Sequence: Synthetic oligonucleotide"
uugucgaugacuuucacauucug

SEQ ID NO: 681 - RNA, 23 nt, Artificial Sequence
  source: /note="Description of Artificial Sequence: Synthetic oligonucleotide"
uugucgaugacuuucacauucug

SEQ ID NO: 682 - RNA, 23 nt, Artificial Sequence
  source: /note="Description of Artificial Sequence: Synthetic oligonucleotide"
uugucgaugacuuucacauucug

SEQ ID NO: 683 - RNA, 23 nt, Artificial Sequence
  source: /note="Description of Artificial Sequence: Synthetic oligonucleotide"
uugucgaugacuuucacauucug

SEQ ID NO: 684 - RNA, 23 nt, Artificial Sequence
  source: /note="Description of Artificial Sequence: Synthetic oligonucleotide"
uugucgaugacuuucacauucug

SEQ ID NO: 685 - DNA, 23 bp, Artificial Sequence
  source: /note="Description of Artificial Sequence: Synthetic oligonucleotide"
  source: /note="Description of Combined DNA/RNA Molecule: Synthetic oligonucleotide"
utgucgaugacuutcacauucug

SEQ ID NO: 686 - DNA, 23 bp, Artificial Sequence
  source: /note="Description of Artificial Sequence: Synthetic oligonucleotide"
  source: /note="Description of Combined DNA/RNA Molecule: Synthetic oligonucleotide"
uugucgaugacuutcacauucug

SEQ ID NO: 687 - DNA, 23 bp, Artificial Sequence
  source: /note="Description of Artificial Sequence: Synthetic oligonucleotide"
  source: /note="Description of Combined DNA/RNA Molecule: Synthetic oligonucleotide"
utgucgaugacuutcacauucug

SEQ ID NO: 688 - DNA, 23 bp, Artificial Sequence
  source: /note="Description of Artificial Sequence: Synthetic oligonucleotide"
  source: /note="Description of Combined DNA/RNA Molecule: Synthetic oligonucleotide"
uugucgaugacuutcacauucug

SEQ ID NO: 689 - DNA, 23 bp, Artificial Sequence
  source: /note="Description of Artificial Sequence: Synthetic oligonucleotide"
  source: /note="Description of Combined DNA/RNA Molecule: Synthetic oligonucleotide"
utgucgaugacuutcacauucug

SEQ ID NO: 690 - DNA, 23 bp, Artificial Sequence
  source: /note="Description of Artificial Sequence: Synthetic oligonucleotide"
  source: /note="Description of Combined DNA/RNA Molecule: Synthetic oligonucleotide"
utgucgaugacuutcacauucug

SEQ ID NO: 691 - DNA, 23 bp, Artificial Sequence
  source: /note="Description of Artificial Sequence: Synthetic oligonucleotide"
  source: /note="Description of Combined DNA/RNA Molecule: Synthetic oligonucleotide"
utgucgaugacuutcacauucug

SEQ ID NO: 692 - RNA, 23 nt, Artificial Sequence
  source: /note="Description of Artificial Sequence: Synthetic oligonucleotide"
uauauuuccaggaugaaagucca

SEQ ID NO: 693 - RNA, 23 nt, Artificial Sequence
  source: /note="Description of Artificial Sequence: Synthetic oligonucleotide"
uauauuuccaggaugaaagucca

SEQ ID NO: 694 - RNA, 23 nt, Artificial Sequence
  source: /note="Description of Artificial Sequence: Synthetic oligonucleotide"
uauauuuccaggaugaaagucca

SEQ ID NO: 695 - RNA, 23 nt, Artificial Sequence
  source: /note="Description of Artificial Sequence: Synthetic oligonucleotide"
uauauuuccaggaugaaagucca

SEQ ID NO: 696 - RNA, 23 nt, Artificial Sequence
  source: /note="Description of Artificial Sequence: Synthetic oligonucleotide"
uauauuuccaggaugaaagucca

SEQ ID NO: 697 - RNA, 23 nt, Artificial Sequence
  source: /note="Description of Artificial Sequence: Synthetic oligonucleotide"
uauauuuccaggaugaaagucca

SEQ ID NO: 698 - RNA, 21 nt, Artificial Sequence
  source: /note="Description of Artificial Sequence: Synthetic oligonucleotide"
uauauuuccaggaugaaaguc

SEQ ID NO: 699 - RNA, 21 nt, Artificial Sequence
  source: /note="Description of Artificial Sequence: Synthetic oligonucleotide"
uauauuuccaggaugaaaguc

SEQ ID NO: 700 - RNA, 23 nt, Artificial Sequence
  source: /note="Description of Artificial Sequence: Synthetic oligonucleotide"
uauauuuccaggaugaaagucca

SEQ ID NO: 701 - RNA, 23 nt, Artificial Sequence
  source: /note="Description of Artificial Sequence: Synthetic oligonucleotide"
uauauuuccaggaugaaagucca

SEQ ID NO: 702 - RNA, 23 nt, Artificial Sequence
  source: /note="Description of Artificial Sequence: Synthetic oligonucleotide"
uauauuuccaggaugaaagucca

SEQ ID NO: 703 - RNA, 23 nt, Artificial Sequence
  source: /note="Description of Artificial Sequence: Synthetic oligonucleotide"
uauauuuccaggaugaaagucca

SEQ ID NO: 704 - RNA, 23 nt, Artificial Sequence
  source: /note="Description of Artificial Sequence: Synthetic oligonucleotide"
uauauuuccaggaugaaagucca

SEQ ID NO: 705 - RNA, 23 nt, Artificial Sequence
  source: /note="Description of Artificial Sequence: Synthetic oligonucleotide"
uauauuuccaggaugaaagucca

SEQ ID NO: 706 - RNA, 23 nt, Artificial Sequence
  source: /note="Description of Artificial Sequence: Synthetic oligonucleotide"
uauauuuccaggaugaaagucca

SEQ ID NO: 707 - RNA, 23 nt, Artificial Sequence
  source: /note="Description of Artificial Sequence: Synthetic oligonucleotide"
uauauuuccaggaugaaagucca

SEQ ID NO: 708 - RNA, 23 nt, Artificial Sequence
  source: /note="Description of Artificial Sequence: Synthetic oligonucleotide"
uauauuuccaggaugaaagucca

SEQ ID NO: 709 - RNA, 23 nt, Artificial Sequence
  source: /note="Description of Artificial Sequence: Synthetic oligonucleotide"
uauauuuccaggaugaaagucca

SEQ ID NO: 710 - RNA, 23 nt, Artificial Sequence
  source: /note="Description of Artificial Sequence: Synthetic oligonucleotide"
uauauuuccaggaugaaagucca

SEQ ID NO: 711 - RNA, 23 nt, Artificial Sequence
  source: /note="Description of Artificial Sequence: Synthetic oligonucleotide"
uauauuuccaggaugaaagucca

SEQ ID NO: 712 - RNA, 23 nt, Artificial Sequence
  source: /note="Description of Artificial Sequence: Synthetic oligonucleotide"
uauauuuccaggaugaaagucca

SEQ ID NO: 713 - RNA, 23 nt, Artificial Sequence
  source: /note="Description of Artificial Sequence: Synthetic oligonucleotide"
uauauuuccaggaugaaagucca

SEQ ID NO: 714 - RNA, 23 nt, Artificial Sequence
  source: /note="Description of Artificial Sequence: Synthetic oligonucleotide"
uauauuuccaggaugaaagucca

SEQ ID NO: 715 - RNA, 23 nt, Artificial Sequence
  source: /note="Description of Artificial Sequence: Synthetic oligonucleotide"
uauauuuccaggaugaaagucca

SEQ ID NO: 716 - RNA, 23 nt, Artificial Sequence
  source: /note="Description of Artificial Sequence: Synthetic oligonucleotide"
uauauuuccaggaugaaagucca

SEQ ID NO: 717 - RNA, 23 nt, Artificial Sequence
  source: /note="Description of Artificial Sequence: Synthetic oligonucleotide"
uauauuuccaggaugaaagucca

SEQ ID NO: 718 - RNA, 23 nt, Artificial Sequence
  source: /note="Description of Artificial Sequence: Synthetic oligonucleotide"
uauauuuccaggaugaaagucca

SEQ ID NO: 719 - RNA, 23 nt, Artificial Sequence
  source: /note="Description of Artificial Sequence: Synthetic oligonucleotide"
uauauuuccaggaugaaagucca

SEQ ID NO: 720 - RNA, 23 nt, Artificial Sequence
  source: /note="Description of Artificial Sequence: Synthetic oligonucleotide"
uauauuuccaggaugaaagucca

SEQ ID NO: 721 - RNA, 23 nt, Artificial Sequence
  source: /note="Description of Artificial Sequence: Synthetic oligonucleotide"
uauauuuccaggaugaaagucca

SEQ ID NO: 722 - RNA, 23 nt, Artificial Sequence
  source: /note="Description of Artificial Sequence: Synthetic oligonucleotide"
uauauuuccaggaugaaagucca

SEQ ID NO: 723 - DNA, 23 bp, Artificial Sequence
  source: /note="Description of Artificial Sequence: Synthetic oligonucleotide"
  source: /note="Description of Combined DNA/RNA Molecule: Synthetic oligonucleotide"
uauauuuccaggatgaaagucca

SEQ ID NO: 724 - DNA, 23 bp, Artificial Sequence
  source: /note="Description of Artificial Sequence: Synthetic oligonucleotide"
  source: /note="Description of Combined DNA/RNA Molecule: Synthetic oligonucleotide"
uauauuuccaggatgaaagucca

SEQ ID NO: 725 - DNA, 23 bp, Artificial Sequence
  source: /note="Description of Artificial Sequence: Synthetic oligonucleotide"
  source: /note="Description of Combined DNA/RNA Molecule: Synthetic oligonucleotide"
uauauuuccaggatgaaagucca

SEQ ID NO: 726 - DNA, 23 bp, Artificial Sequence
  source: /note="Description of Artificial Sequence: Synthetic oligonucleotide"
  source: /note="Description of Combined DNA/RNA Molecule: Synthetic oligonucleotide"
uauautuccaggatgaaagucca

SEQ ID NO: 727 - DNA, 23 bp, Artificial Sequence
  source: /note="Description of Artificial Sequence: Synthetic oligonucleotide"
  source: /note="Description of Combined DNA/RNA Molecule: Synthetic oligonucleotide"
uauautuccaggatgaaagucca

SEQ ID NO: 728 - DNA, 23 bp, Artificial Sequence
  source: /note="Description of Artificial Sequence: Synthetic oligonucleotide"
  source: /note="Description of Combined DNA/RNA Molecule: Synthetic oligonucleotide"
uauauuuccaggatgaaagucca

SEQ ID NO: 729 - DNA, 23 bp, Artificial Sequence
  source: /note="Description of Artificial Sequence: Synthetic oligonucleotide"
  source: /note="Description of Combined DNA/RNA Molecule: Synthetic oligonucleotide"
uauautuccaggatgaaagucca

SEQ ID NO: 730 - DNA, 23 bp, Artificial Sequence
  source: /note="Description of Artificial Sequence: Synthetic oligonucleotide"
  source: /note="Description of Combined DNA/RNA Molecule: Synthetic oligonucleotide"
uauauuuccaggatgaaagucca

SEQ ID NO: 731 - RNA, 23 nt, Artificial Sequence
  source: /note="Description of Artificial Sequence: Synthetic oligonucleotide"
ugacaucuugaacaccuuucucc

SEQ ID NO: 732 - RNA, 23 nt, Artificial Sequence
  source: /note="Description of Artificial Sequence: Synthetic oligonucleotide"
aguuaauauauuuccaggaugaa

SEQ ID NO: 733 - RNA, 23 nt, Artificial Sequence
  source: /note="Description of Artificial Sequence: Synthetic oligonucleotide"
uugucgaugacuuucacauucug

SEQ ID NO: 734 - RNA, 23 nt, Artificial Sequence
  source: /note="Description of Artificial Sequence: Synthetic oligonucleotide"
uaugggaaaauauugugcacugu

SEQ ID NO: 735 - RNA, 23 nt, Artificial Sequence
  source: /note="Description of Artificial Sequence: Synthetic oligonucleotide"
aaugucuugucgaugacuuucac

SEQ ID NO: 736 - RNA, 23 nt, Artificial Sequence
  source: /note="Description of Artificial Sequence: Synthetic oligonucleotide"
uuugucgaugacuuucacauucu

SEQ ID NO: 737 - RNA, 23 nt, Artificial Sequence
  source: /note="Description of Artificial Sequence: Synthetic oligonucleotide"
uaacaguuaauauauuuccagga

SEQ ID NO: 738 - RNA, 23 nt, Artificial Sequence
  source: /note="Description of Artificial Sequence: Synthetic oligonucleotide"
aaauaauacagaugggaaaauau

SEQ ID NO: 739 - RNA, 23 nt, Artificial Sequence
  source: /note="Description of Artificial Sequence: Synthetic oligonucleotide"
uuuuguuggaaaagaacgacacc

SEQ ID NO: 740 - RNA, 23 nt, Artificial Sequence
  source: /note="Description of Artificial Sequence: Synthetic oligonucleotide"
uaguuaauauauuuccaggauga

SEQ ID NO: 741 - RNA, 23 nt, Artificial Sequence
  source: /note="Description of Artificial Sequence: Synthetic oligonucleotide"
uaucaucaccucucaaaaugccc

SEQ ID NO: 742 - RNA, 23 nt, Artificial Sequence
  source: /note="Description of Artificial Sequence: Synthetic oligonucleotide"
uugaacaccuuucucccccugga

SEQ ID NO: 743 - RNA, 23 nt, Artificial Sequence
  source: /note="Description of Artificial Sequence: Synthetic oligonucleotide"
uuuaacaguuaauauauuuccag

SEQ ID NO: 744 - RNA, 23 nt, Artificial Sequence
  source: /note="Description of Artificial Sequence: Synthetic oligonucleotide"
aaggauuuuuccucaccaauguc

SEQ ID NO: 745 - RNA, 23 nt, Artificial Sequence
  source: /note="Description of Artificial Sequence: Synthetic oligonucleotide"
uaucuugaacaccuuucuccccc

SEQ ID NO: 746 - RNA, 23 nt, Artificial Sequence
  source: /note="Description of Artificial Sequence: Synthetic oligonucleotide"
aucaucaccucucaaaaugcccu

SEQ ID NO: 747 - RNA, 23 nt, Artificial Sequence
  source: /note="Description of Artificial Sequence: Synthetic oligonucleotide"
aaaagaacgacacccuuuguauu

SEQ ID NO: 748 - RNA, 23 nt, Artificial Sequence
  source: /note="Description of Artificial Sequence: Synthetic oligonucleotide"
ugauucgacaccaagaucccauu

SEQ ID NO: 749 - RNA, 23 nt, Artificial Sequence
  source: /note="Description of Artificial Sequence: Synthetic oligonucleotide"
uaaaauauugugcacugucagau

SEQ ID NO: 750 - RNA, 23 nt, Artificial Sequence
  source: /note="Description of Artificial Sequence: Synthetic oligonucleotide"
augggaaaauauugugcacuguc

SEQ ID NO: 751 - RNA, 23 nt, Artificial Sequence
  source: /note="Description of Artificial Sequence: Synthetic oligonucleotide"
uuaggacacccauugaaaaguca

SEQ ID NO: 752 - RNA, 23 nt, Artificial Sequence
  source: /note="Description of Artificial Sequence: Synthetic oligonucleotide"
aggauuuuuccucaccaaugucu

SEQ ID NO: 753 - RNA, 23 nt, Artificial Sequence
  source: /note="Description of Artificial Sequence: Synthetic oligonucleotide"
ucauugaaaagucaaaagcaaug

SEQ ID NO: 754 - RNA, 23 nt, Artificial Sequence
  source: /note="Description of Artificial Sequence: Synthetic oligonucleotide"
ucaucaucaccucucaaaaugcc

SEQ ID NO: 755 - RNA, 23 nt, Artificial Sequence
  source: /note="Description of Artificial Sequence: Synthetic oligonucleotide"
ugacacccauugaaaagucaaaa

SEQ ID NO: 756 - RNA, 23 nt, Artificial Sequence
  source: /note="Description of Artificial Sequence: Synthetic oligonucleotide"
ucuguccuaaaacagaagucgac

SEQ ID NO: 757 - RNA, 23 nt, Artificial Sequence
  source: /note="Description of Artificial Sequence: Synthetic oligonucleotide"
uauucuggcacccacucagagcc

SEQ ID NO: 758 - RNA, 23 nt, Artificial Sequence
  source: /note="Description of Artificial Sequence: Synthetic oligonucleotide"
uacuuucacauucuggcacccac

SEQ ID NO: 759 - RNA, 23 nt, Artificial Sequence
  source: /note="Description of Artificial Sequence: Synthetic oligonucleotide"
uguuccuaggacacccauugaaa

SEQ ID NO: 760 - RNA, 23 nt, Artificial Sequence
  source: /note="Description of Artificial Sequence: Synthetic oligonucleotide"
uaaugucuugucgaugacuuuca

SEQ ID NO: 761 - RNA, 23 nt, Artificial Sequence
  source: /note="Description of Artificial Sequence: Synthetic oligonucleotide"
ugcaucaucaccucucaaaaugc

SEQ ID NO: 762 - RNA, 23 nt, Artificial Sequence
  source: /note="Description of Artificial Sequence: Synthetic oligonucleotide"
ucucaccaaugucuugucgauga

SEQ ID NO: 763 - RNA, 23 nt, Artificial Sequence
  source: /note="Description of Artificial Sequence: Synthetic oligonucleotide"
ugacuuucacauucuggcaccca

SEQ ID NO: 764 - RNA, 23 nt, Artificial Sequence
  source: /note="Description of Artificial Sequence: Synthetic oligonucleotide"
uggaaaauauugugcacugucag

SEQ ID NO: 765 - RNA, 23 nt, Artificial Sequence
  source: /note="Description of Artificial Sequence: Synthetic oligonucleotide"
uucugcacagugucucuuuguca

SEQ ID NO: 766 - RNA, 23 nt, Artificial Sequence
  source: /note="Description of Artificial Sequence: Synthetic oligonucleotide"
uccuaggacacccauugaaaagu

SEQ ID NO: 767 - RNA, 23 nt, Artificial Sequence
  source: /note="Description of Artificial Sequence: Synthetic oligonucleotide"
acugucagaucuuggaaacggcc

SEQ ID NO: 768 - RNA, 23 nt, Artificial Sequence
  source: /note="Description of Artificial Sequence: Synthetic oligonucleotide"
uuugaacaccuuucucccccugg

SEQ ID NO: 769 - RNA, 23 nt, Artificial Sequence
  source: /note="Description of Artificial Sequence: Synthetic oligonucleotide"
accaaugucuugucgaugacuuu

SEQ ID NO: 770 - DNA, 21 bp, Artificial Sequence
  source: /note="Description of Artificial Sequence: Synthetic oligonucleotide"
  source: /note="Description of Combined DNA/RNA Molecule: Synthetic oligonucleotide"
uucaauggguguccuaggatt

SEQ ID NO: 771 - RNA, 19 nt, Artificial Sequence
  source: /note="Description of Artificial Sequence: Synthetic oligonucleotide"
uucaauggguguccuagga

SEQ ID NO: 772 - DNA, 21 bp, Artificial Sequence
  source: /note="Description of Artificial Sequence: Synthetic oligonucleotide"
  source: /note="Description of Combined DNA/RNA Molecule: Synthetic oligonucleotide"
acaacuggagggacaucgutt

SEQ ID NO: 773 - RNA, 19 nt, Artificial Sequence
  source: /note="Description of Artificial Sequence: Synthetic oligonucleotide"
acaacuggagggacaucgu

SEQ ID NO: 774 - DNA, 21 bp, Artificial Sequence
  source: /note="Description of Artificial Sequence: Synthetic oligonucleotide"
  source: /note="Description of Combined DNA/RNA Molecule: Synthetic oligonucleotide"
uccuaggacacccauugaatt

SEQ ID NO: 775 - RNA, 19 nt, Artificial Sequence
  source: /note="Description of Artificial Sequence: Synthetic oligonucleotide"
uccuaggacacccauugaa

SEQ ID NO: 776 - DNA, 21 bp, Artificial Sequence
  source: /note="Description of Artificial Sequence: Synthetic oligonucleotide"
  source: /note="Description of Combined DNA/RNA Molecule: Synthetic oligonucleotide"
acgaugucccuccaguugutt

SEQ ID NO: 777 - RNA, 19 nt, Artificial Sequence
  source: /note="Description of Artificial Sequence: Synthetic oligonucleotide"
acgaugucccuccaguugu

SEQ ID NO: 778 - RNA, 21 nt, Artificial Sequence
  source: /note="Description of Artificial Sequence: Synthetic oligonucleotide"
uccuaggaaccuuuuagaaau

SEQ ID NO: 779 - RNA, 21 nt, Artificial Sequence
  source: /note="Description of Artificial Sequence: Synthetic oligonucleotide"
gacuuucauccuggaaauaua

SEQ ID NO: 780 - RNA, 21 nt, Artificial Sequence
  source: /note="Description of Artificial Sequence: Synthetic oligonucleotide"
gaaugugaaagucaucgacaa

SEQ ID NO: 781 - RNA, 21 nt, Artificial Sequence
  source: /note="Description of Artificial Sequence: Synthetic oligonucleotide"
cauuggugaggaaaaauccuu

SEQ ID NO: 782 - RNA, 21 nt, Artificial Sequence
  source: /note="Description of Artificial Sequence: Synthetic oligonucleotide"
aucgacaagacauuggugaga

SEQ ID NO: 783 - RNA, 21 nt, Artificial Sequence
  source: /note="Description of Artificial Sequence: Synthetic oligonucleotide"
acauuggugaggaaaaauccu

SEQ ID NO: 784 - RNA, 21 nt, Artificial Sequence
  source: /note="Description of Artificial Sequence: Synthetic oligonucleotide"
gaaagucaucgacaagacauu

SEQ ID NO: 785 - RNA, 21 nt, Artificial Sequence
  source: /note="Description of Artificial Sequence: Synthetic oligonucleotide"
aaagucaucgacaagacauua

SEQ ID NO: 786 - RNA, 23 nt, Artificial Sequence
  source: /note="Description of Artificial Sequence: Synthetic oligonucleotide"
auuucuaaaagguuccuaggaca

SEQ ID NO: 787 - RNA, 23 nt, Artificial Sequence
  source: /note="Description of Artificial Sequence: Synthetic oligonucleotide"
uauauuuccaggaugaaagucca

SEQ ID NO: 788 - RNA, 23 nt, Artificial Sequence
  source: /note="Description of Artificial Sequence: Synthetic oligonucleotide"
uugucgaugacuuucacauucug

SEQ ID NO: 789 - RNA, 23 nt, Artificial Sequence
  source: /note="Description of Artificial Sequence: Synthetic oligonucleotide"
aaggauuuuuccucaccaauguc

SEQ ID NO: 790 - RNA, 23 nt, Artificial Sequence
  source: /note="Description of Artificial Sequence: Synthetic oligonucleotide"
ucucaccaaugucuugucgauga

SEQ ID NO: 791 - RNA, 23 nt, Artificial Sequence
  source: /note="Description of Artificial Sequence: Synthetic oligonucleotide"
aggauuuuuccucaccaaugucu

SEQ ID NO: 792 - RNA, 23 nt, Artificial Sequence
  source: /note="Description of Artificial Sequence: Synthetic oligonucleotide"
aaugucuugucgaugacuuucac

SEQ ID NO: 793 - RNA, 23 nt, Artificial Sequence
  source: /note="Description of Artificial Sequence: Synthetic oligonucleotide"
uaaugucuugucgaugacuuuca

SEQ ID NO: 794 - RNA, 21 nt, Artificial Sequence
  source: /note="Description of Artificial Sequence: Synthetic oligonucleotide"
auguauguuacuucuuagaga

SEQ ID NO: 795 - RNA, 23 nt, Artificial Sequence
  source: /note="Description of Artificial Sequence: Synthetic oligonucleotide"
ucucuaagaaguaacauacaucc

SEQ ID NO: 796 - RNA, 21 nt, Artificial Sequence
  source: /note="Description of Artificial Sequence: Synthetic oligonucleotide"
uguauguuacuucuuagagag

SEQ ID NO: 797 - RNA, 23 nt, Artificial Sequence
  source: /note="Description of Artificial Sequence: Synthetic oligonucleotide"
cucucuaagaaguaacauacauc

SEQ ID NO: 798 - RNA, 21 nt, Artificial Sequence
  source: /note="Description of Artificial Sequence: Synthetic oligonucleotide"
uaggauguauguuacuucuua

SEQ ID NO: 799 - RNA, 23 nt, Artificial Sequence
  source: /note="Description of Artificial Sequence: Synthetic oligonucleotide"
uaagaaguaacauacauccuaaa

SEQ ID NO: 800 - RNA, 21 nt, Artificial Sequence
  source: /note="Description of Artificial Sequence: Synthetic oligonucleotide"
uuaggauguauguuacuucuu

SEQ ID NO: 801 - RNA, 23 nt, Artificial Sequence
  source: /note="Description of Artificial Sequence: Synthetic oligonucleotide"
aagaaguaacauacauccuaaaa

SEQ ID NO: 802 - RNA, 21 nt, Artificial Sequence
  source: /note="Description of Artificial Sequence: Synthetic oligonucleotide"
agaaagguguucaagaugucc

SEQ ID NO: 803 - RNA, 23 nt, Artificial Sequence
  source: /note="Description of Artificial Sequence: Synthetic oligonucleotide"
ggacaucuugaacaccuuucucc

SEQ ID NO: 804 - RNA, 21 nt, Artificial Sequence
  source: /note="Description of Artificial Sequence: Synthetic oligonucleotide"
gaaagguguucaagauguccu

SEQ ID NO: 805 - RNA, 23 nt, Artificial Sequence
  source: /note="Description of Artificial Sequence: Synthetic oligonucleotide"
aggacaucuugaacaccuuucuc

SEQ ID NO: 806 - RNA, 21 nt, Artificial Sequence
  source: /note="Description of Artificial Sequence: Synthetic oligonucleotide"
ggggagaaagguguucaagau

SEQ ID NO: 807 - RNA, 23 nt, Artificial Sequence
  source: /note="Description of Artificial Sequence: Synthetic oligonucleotide"
aucuugaacaccuuucucccccu

SEQ ID NO: 808 - RNA, 21 nt, Artificial Sequence
  source: /note="Description of Artificial Sequence: Synthetic oligonucleotide"
gggggagaaagguguucaaga

SEQ ID NO: 809 - RNA, 23 nt, Artificial Sequence
  source: /note="Description of Artificial Sequence: Synthetic oligonucleotide"
ucuugaacaccuuucucccccug

SEQ ID NO: 810 - RNA, 21 nt, Artificial Sequence
  source: /note="Description of Artificial Sequence: Synthetic oligonucleotide"
agaaacuuuggcugauaauau

SEQ ID NO: 811 - RNA, 23 nt, Artificial Sequence
  source: /note="Description of Artificial Sequence: Synthetic oligonucleotide"
auauuaucagccaaaguuucuuc

SEQ ID NO: 812 - RNA, 21 nt, Artificial Sequence
  source: /note="Description of Artificial Sequence: Synthetic oligonucleotide"
gaaacuuuggcugauaauauu

SEQ ID NO: 813 - RNA, 23 nt, Artificial Sequence
  source: /note="Description of Artificial Sequence: Synthetic oligonucleotide"
aauauuaucagccaaaguuucuu

SEQ ID NO: 814 - RNA, 21 nt, Artificial Sequence
  source: /note="Description of Artificial Sequence: Synthetic oligonucleotide"
augaagaaacuuuggcugaua

SEQ ID NO: 815 - RNA, 23 nt, Artificial Sequence
  source: /note="Description of Artificial Sequence: Synthetic oligonucleotide"
uaucagccaaaguuucuucauca

SEQ ID NO: 816 - RNA, 21 nt, Artificial Sequence
  source: /note="Description of Artificial Sequence: Synthetic oligonucleotide"
gaugaagaaacuuuggcugau

SEQ ID NO: 817 - RNA, 23 nt, Artificial Sequence
  source: /note="Description of Artificial Sequence: Synthetic oligonucleotide"
aucagccaaaguuucuucaucau

SEQ ID NO: 818 - RNA, 21 nt, Artificial Sequence
  source: /note="Description of Artificial Sequence: Synthetic oligonucleotide"
aaggcacugauguucugaaag

SEQ ID NO: 819 - RNA, 23 nt, Artificial Sequence
  source: /note="Description of Artificial Sequence: Synthetic oligonucleotide"
cuuucagaacaucagugccuuuc

SEQ ID NO: 820 - RNA, 21 nt, Artificial Sequence
  source: /note="Description of Artificial Sequence: Synthetic oligonucleotide"
aggcacugauguucugaaagc

SEQ ID NO: 821 - RNA, 23 nt, Artificial Sequence
  source: /note="Description of Artificial Sequence: Synthetic oligonucleotide"
gcuuucagaacaucagugccuuu

SEQ ID NO: 822 - RNA, 21 nt, Artificial Sequence
  source: /note="Description of Artificial Sequence: Synthetic oligonucleotide"
cggaaaggcacugauguucug

SEQ ID NO: 823 - RNA, 23 nt, Artificial Sequence
  source: /note="Description of Artificial Sequence: Synthetic oligonucleotide"
cagaacaucagugccuuuccgca

SEQ ID NO: 824 - RNA, 21 nt, Artificial Sequence
  source: /note="Description of Artificial Sequence: Synthetic oligonucleotide"
gcggaaaggcacugauguucu

SEQ ID NO: 825 - RNA, 23 nt, Artificial Sequence
  source: /note="Description of Artificial Sequence: Synthetic oligonucleotide"
agaacaucagugccuuuccgcac

SEQ ID NO: 826 - RNA, 21 nt, Artificial Sequence
  source: /note="Description of Artificial Sequence: Synthetic oligonucleotide"
agaagacugacaucauugcca

SEQ ID NO: 827 - RNA, 23 nt, Artificial Sequence
  source: /note="Description of Artificial Sequence: Synthetic oligonucleotide"
uggcaaugaugucagucuucuca

SEQ ID NO: 828 - RNA, 21 nt, Artificial Sequence
  source: /note="Description of Artificial Sequence: Synthetic oligonucleotide"
gaagacugacaucauugccaa

SEQ ID NO: 829 - RNA, 23 nt, Artificial Sequence
  source: /note="Description of Artificial Sequence: Synthetic oligonucleotide"
uuggcaaugaugucagucuucuc

SEQ ID NO: 830 - RNA, 21 nt, Artificial Sequence
  source: /note="Description of Artificial Sequence: Synthetic oligonucleotide"
gcugagaagacugacaucauu

SEQ ID NO: 831 - RNA, 23 nt, Artificial Sequence
  source: /note="Description of Artificial Sequence: Synthetic oligonucleotide"
aaugaugucagucuucucagcca

SEQ ID NO: 832 - RNA, 21 nt, Artificial Sequence
  source: /note="Description of Artificial Sequence: Synthetic oligonucleotide"
ggcugagaagacugacaucau

SEQ ID NO: 833 - RNA, 23 nt, Artificial Sequence
  source: /note="Description of Artificial Sequence: Synthetic oligonucleotide"
augaugucagucuucucagccau

SEQ ID NO: 834 - RNA, 21 nt, Artificial Sequence
  source: /note="Description of Artificial Sequence: Synthetic oligonucleotide"
uaaugccugauucacaacuuu

SEQ ID NO: 835 - RNA, 23 nt, Artificial Sequence
  source: /note="Description of Artificial Sequence: Synthetic oligonucleotide"
aaaguugugaaucaggcauuacc

SEQ ID NO: 836 - RNA, 21 nt, Artificial Sequence
  source: /note="Description of Artificial Sequence: Synthetic oligonucleotide"
aaugccugauucacaacuuug

SEQ ID NO: 837 - RNA, 23 nt, Artificial Sequence
  source: /note="Description of Artificial Sequence: Synthetic oligonucleotide"
caaaguugugaaucaggcauuac

SEQ ID NO: 838 - RNA, 21 nt, Artificial Sequence
  source: /note="Description of Artificial Sequence: Synthetic oligonucleotide"
uugguaaugccugauucacaa

SEQ ID NO: 839 - RNA, 23 nt, Artificial Sequence
  source: /note="Description of Artificial Sequence: Synthetic oligonucleotide"
uugugaaucaggcauuaccaaca

SEQ ID NO: 840 - RNA, 21 nt, Artificial Sequence
  source: /note="Description of Artificial Sequence: Synthetic oligonucleotide"
guugguaaugccugauucaca

SEQ ID NO: 841 - RNA, 23 nt, Artificial Sequence
  source: /note="Description of Artificial Sequence: Synthetic oligonucleotide"
ugugaaucaggcauuaccaacac

SEQ ID NO: 842 - RNA, 21 nt, Artificial Sequence
  source: /note="Description of Artificial Sequence: Synthetic oligonucleotide"
uaucaaauggcugagaagacu

SEQ ID NO: 843 - RNA, 23 nt, Artificial Sequence
  source: /note="Description of Artificial Sequence: Synthetic oligonucleotide"
agucuucucagccauuugauauc

SEQ ID NO: 844 - RNA, 21 nt, Artificial Sequence
  source: /note="Description of Artificial Sequence: Synthetic oligonucleotide"
aucaaauggcugagaagacug

SEQ ID NO: 845 - RNA, 23 nt, Artificial Sequence
  source: /note="Description of Artificial Sequence: Synthetic oligonucleotide"
cagucuucucagccauuugauau

SEQ ID NO: 846 - RNA, 21 nt, Artificial Sequence
  source: /note="Description of Artificial Sequence: Synthetic oligonucleotide"
aagauaucaaauggcugagaa

SEQ ID NO: 847 - RNA, 23 nt, Artificial Sequence
  source: /note="Description of Artificial Sequence: Synthetic oligonucleotide"
uucucagccauuugauaucuucc

SEQ ID NO: 848 - RNA, 21 nt, Artificial Sequence
  source: /note="Description of Artificial Sequence: Synthetic oligonucleotide"
gaagauaucaaauggcugaga

SEQ ID NO: 849 - RNA, 23 nt, Artificial Sequence
  source: /note="Description of Artificial Sequence: Synthetic oligonucleotide"
ucucagccauuugauaucuuccc

SEQ ID NO: 850 - RNA, 21 nt, Artificial Sequence
  source: /note="Description of Artificial Sequence: Synthetic oligonucleotide"
ucugacagugcacaauauuuu

SEQ ID NO: 851 - RNA, 23 nt, Artificial Sequence
  source: /note="Description of Artificial Sequence: Synthetic oligonucleotide"
aaaauauugugcacugucagauc

SEQ ID NO: 852 - RNA, 21 nt, Artificial Sequence
  source: /note="Description of Artificial Sequence: Synthetic oligonucleotide"
cugacagugcacaauauuuuc

SEQ ID NO: 853 - RNA, 23 nt, Artificial Sequence
  source: /note="Description of Artificial Sequence: Synthetic oligonucleotide"
gaaaauauugugcacugucagau

SEQ ID NO: 854 - RNA, 21 nt, Artificial Sequence
  source: /note="Description of Artificial Sequence: Synthetic oligonucleotide"
aagaucugacagugcacaaua

SEQ ID NO: 855 - RNA, 23 nt, Artificial Sequence
  source: /note="Description of Artificial Sequence: Synthetic oligonucleotide"
uauugugcacugucagaucuugg

SEQ ID NO: 856 - RNA, 21 nt, Artificial Sequence
  source: /note="Description of Artificial Sequence: Synthetic oligonucleotide"
caagaucugacagugcacaau

SEQ ID NO: 857 - RNA, 23 nt, Artificial Sequence
  source: /note="Description of Artificial Sequence: Synthetic oligonucleotide"
auugugcacugucagaucuugga

SEQ ID NO: 858 - RNA, 21 nt, Artificial Sequence
  source: /note="Description of Artificial Sequence: Synthetic oligonucleotide"
acugauguucugaaagcucug

SEQ ID NO: 859 - RNA, 23 nt, Artificial Sequence
  source: /note="Description of Artificial Sequence: Synthetic oligonucleotide"
cagagcuuucagaacaucagugc

SEQ ID NO: 860 - RNA, 21 nt, Artificial Sequence
  source: /note="Description of Artificial Sequence: Synthetic oligonucleotide"
cugauguucugaaagcucugg

SEQ ID NO: 861 - RNA, 23 nt, Artificial Sequence
  source: /note="Description of Artificial Sequence: Synthetic oligonucleotide"
ccagagcuuucagaacaucagug

SEQ ID NO: 862 - RNA, 21 nt, Artificial Sequence
  source: /note="Description of Artificial Sequence: Synthetic oligonucleotide"
aggcacugauguucugaaagc

SEQ ID NO: 863 - RNA, 23 nt, Artificial Sequence
  source: /note="Description of Artificial Sequence: Synthetic oligonucleotide"
gcuuucagaacaucagugccuuu

SEQ ID NO: 864 - RNA, 21 nt, Artificial Sequence
  source: /note="Description of Artificial Sequence: Synthetic oligonucleotide"
aaggcacugauguucugaaag

SEQ ID NO: 865 - RNA, 23 nt, Artificial Sequence
  source: /note="Description of Artificial Sequence: Synthetic oligonucleotide"
cuuucagaacaucagugccuuuc

SEQ ID NO: 866 - RNA, 21 nt, Artificial Sequence
  source: /note="Description of Artificial Sequence: Synthetic oligonucleotide"
aacaacaugcuaaaucaguac

SEQ ID NO: 867 - RNA, 23 nt, Artificial Sequence
  source: /note="Description of Artificial Sequence: Synthetic oligonucleotide"
guacugauuuagcauguuguuca

SEQ ID NO: 868 - RNA, 21 nt, Artificial Sequence
  source: /note="Description of Artificial Sequence: Synthetic oligonucleotide"
acaacaugcuaaaucaguacu

SEQ ID NO: 869 - RNA, 23 nt, Artificial Sequence
  source: /note="Description of Artificial Sequence: Synthetic oligonucleotide"
aguacugauuuagcauguuguuc

SEQ ID NO: 870 - RNA, 21 nt, Artificial Sequence
  source: /note="Description of Artificial Sequence: Synthetic oligonucleotide"
uaugaacaacaugcuaaauca

SEQ ID NO: 871 - RNA, 23 nt, Artificial Sequence
  source: /note="Description of Artificial Sequence: Synthetic oligonucleotide"
ugauuuagcauguuguucauaau

SEQ ID NO: 872 - RNA, 21 nt, Artificial Sequence
  source: /note="Description of Artificial Sequence: Synthetic oligonucleotide"
uuaugaacaacaugcuaaauc

SEQ ID NO: 873 - RNA, 23 nt, Artificial Sequence
  source: /note="Description of Artificial Sequence: Synthetic oligonucleotide"
gauuuagcauguuguucauaauc

SEQ ID NO: 874 - RNA, 21 nt, Artificial Sequence
  source: /note="Description of Artificial Sequence: Synthetic oligonucleotide"
ucuuuagugucugaauauauc

SEQ ID NO: 875 - RNA, 23 nt, Artificial Sequence
  source: /note="Description of Artificial Sequence: Synthetic oligonucleotide"
gauauauucagacacuaaagaug

SEQ ID NO: 876 - RNA, 21 nt, Artificial Sequence
  source: /note="Description of Artificial Sequence: Synthetic oligonucleotide"
cuuuagugucugaauauaucc

SEQ ID NO: 877 - RNA, 23 nt, Artificial Sequence
  source: /note="Description of Artificial Sequence: Synthetic oligonucleotide"
ggauauauucagacacuaaagau

SEQ ID NO: 878 - RNA, 21 nt, Artificial Sequence
  source: /note="Description of Artificial Sequence: Synthetic oligonucleotide"
cacaucuuuagugucugaaua

SEQ ID NO: 879 - RNA, 23 nt, Artificial Sequence
  source: /note="Description of Artificial Sequence: Synthetic oligonucleotide"
uauucagacacuaaagaugugau

SEQ ID NO: 880 - RNA, 21 nt, Artificial Sequence
  source: /note="Description of Artificial Sequence: Synthetic oligonucleotide"
ucacaucuuuagugucugaau

SEQ ID NO: 881 - RNA, 23 nt, Artificial Sequence
  source: /note="Description of Artificial Sequence: Synthetic oligonucleotide"
auucagacacuaaagaugugauu

SEQ ID NO: 882 - RNA, 21 nt, Artificial Sequence
  source: /note="Description of Artificial Sequence: Synthetic oligonucleotide"
ugauacuucuuugaauguaga

SEQ ID NO: 883 - RNA, 23 nt, Artificial Sequence
  source: /note="Description of Artificial Sequence: Synthetic oligonucleotide"
ucuacauucaaagaaguaucacc

SEQ ID NO: 884 - RNA, 21 nt, Artificial Sequence
  source: /note="Description of Artificial Sequence: Synthetic oligonucleotide"
gauacuucuuugaauguagau

SEQ ID NO: 885 - RNA, 23 nt, Artificial Sequence
  source: /note="Description of Artificial Sequence: Synthetic oligonucleotide"
aucuacauucaaagaaguaucac

SEQ ID NO: 886 - RNA, 21 nt, Artificial Sequence
  source: /note="Description of Artificial Sequence: Synthetic oligonucleotide"
uuggugauacuucuuugaaug

SEQ ID NO: 887 - RNA, 23 nt, Artificial Sequence
  source: /note="Description of Artificial Sequence: Synthetic oligonucleotide"
cauucaaagaaguaucaccaauu

SEQ ID NO: 888 - RNA, 21 nt, Artificial Sequence
  source: /note="Description of Artificial Sequence: Synthetic oligonucleotide"
auuggugauacuucuuugaau

SEQ ID NO: 889 - RNA, 23 nt, Artificial Sequence
  source: /note="Description of Artificial Sequence: Synthetic oligonucleotide"
auucaaagaaguaucaccaauua

SEQ ID NO: 890 - RNA, 21 nt, Artificial Sequence
  source: /note="Description of Artificial Sequence: Synthetic oligonucleotide"
aauaaccugugaaaaugcucc

SEQ ID NO: 891 - RNA, 23 nt, Artificial Sequence
  source: /note="Description of Artificial Sequence: Synthetic oligonucleotide"
ggagcauuuucacagguuauugc

SEQ ID NO: 892 - RNA, 21 nt, Artificial Sequence
  source: /note="Description of Artificial Sequence: Synthetic oligonucleotide"
auaaccugugaaaaugcuccc

SEQ ID NO: 893 - RNA, 23 nt, Artificial Sequence
  source: /note="Description of Artificial Sequence: Synthetic oligonucleotide"
gggagcauuuucacagguuauug

SEQ ID NO: 894 - RNA, 21 nt, Artificial Sequence
  source: /note="Description of Artificial Sequence: Synthetic oligonucleotide"
uagcaauaaccugugaaaaug

SEQ ID NO: 895 - RNA, 23 nt, Artificial Sequence
  source: /note="Description of Artificial Sequence: Synthetic oligonucleotide"
cauuuucacagguuauugcuauc

SEQ ID NO: 896 - RNA, 21 nt, Artificial Sequence
  source: /note="Description of Artificial Sequence: Synthetic oligonucleotide"
auagcaauaaccugugaaaau

SEQ ID NO: 897 - RNA, 23 nt, Artificial Sequence
  source: /note="Description of Artificial Sequence: Synthetic oligonucleotide"
auuuucacagguuauugcuaucc

SEQ ID NO: 898 - RNA, 21 nt, Artificial Sequence
  source: /note="Description of Artificial Sequence: Synthetic oligonucleotide"
aaucacaucuuuagugucuga

SEQ ID NO: 899 - RNA, 23 nt, Artificial Sequence
  source: /note="Description of Artificial Sequence: Synthetic oligonucleotide"
ucagacacuaaagaugugauugg

SEQ ID NO: 900 - RNA, 21 nt, Artificial Sequence
  source: /note="Description of Artificial Sequence: Synthetic oligonucleotide"
aucacaucuuuagugucugaa

SEQ ID NO: 901 - RNA, 23 nt, Artificial Sequence
  source: /note="Description of Artificial Sequence: Synthetic oligonucleotide"
uucagacacuaaagaugugauug

SEQ ID NO: 902 - RNA, 21 nt, Artificial Sequence
  source: /note="Description of Artificial Sequence: Synthetic oligonucleotide"
uuccaaucacaucuuuagugu

SEQ ID NO: 903 - RNA, 23 nt, Artificial Sequence
  source: /note="Description of Artificial Sequence: Synthetic oligonucleotide"
acacuaaagaugugauuggaaau

SEQ ID NO: 904 - RNA, 21 nt, Artificial Sequence
  source: /note="Description of Artificial Sequence: Synthetic oligonucleotide"
uuuccaaucacaucuuuagug

SEQ ID NO: 905 - RNA, 23 nt, Artificial Sequence
  source: /note="Description of Artificial Sequence: Synthetic oligonucleotide"
cacuaaagaugugauuggaaauc

SEQ ID NO: 906 - RNA, 21 nt, Artificial Sequence
  source: /note="Description of Artificial Sequence: Synthetic oligonucleotide"
acgggcaugauguugaguucc

SEQ ID NO: 907 - RNA, 23 nt, Artificial Sequence
  source: /note="Description of Artificial Sequence: Synthetic oligonucleotide"
ggaacucaacaucaugcccguuc

SEQ ID NO: 908 - RNA, 21 nt, Artificial Sequence
  source: /note="Description of Artificial Sequence: Synthetic oligonucleotide"
cgggcaugauguugaguuccu

SEQ ID NO: 909 - RNA, 23 nt, Artificial Sequence
  source: /note="Description of Artificial Sequence: Synthetic oligonucleotide"
aggaacucaacaucaugcccguu

SEQ ID NO: 910 - RNA, 21 nt, Artificial Sequence
  source: /note="Description of Artificial Sequence: Synthetic oligonucleotide"
gggaacgggcaugauguugag

SEQ ID NO: 911 - RNA, 23 nt, Artificial Sequence
  source: /note="Description of Artificial Sequence: Synthetic oligonucleotide"
cucaacaucaugcccguucccag

SEQ ID NO: 912 - RNA, 21 nt, Artificial Sequence
  source: /note="Description of Artificial Sequence: Synthetic oligonucleotide"
ugggaacgggcaugauguuga

SEQ ID NO: 913 - RNA, 23 nt, Artificial Sequence
  source: /note="Description of Artificial Sequence: Synthetic oligonucleotide"
ucaacaucaugcccguucccagg

SEQ ID NO: 914 - RNA, 21 nt, Artificial Sequence
  source: /note="Description of Artificial Sequence: Synthetic oligonucleotide"
acuaaggugaaaagauaauga

SEQ ID NO: 915 - RNA, 23 nt, Artificial Sequence
  source: /note="Description of Artificial Sequence: Synthetic oligonucleotide"
ucauuaucuuuucaccuuagugu

SEQ ID NO: 916 - RNA, 21 nt, Artificial Sequence
  source: /note="Description of Artificial Sequence: Synthetic oligonucleotide"
cuaaggugaaaagauaaugau

SEQ ID NO: 917 - RNA, 23 nt, Artificial Sequence
  source: /note="Description of Artificial Sequence: Synthetic oligonucleotide"
aucauuaucuuuucaccuuagug

SEQ ID NO: 918 - RNA, 21 nt, Artificial Sequence
  source: /note="Description of Artificial Sequence: Synthetic oligonucleotide"
aaacacuaaggugaaaagaua

SEQ ID NO: 919 - RNA, 23 nt, Artificial Sequence
  source: /note="Description of Artificial Sequence: Synthetic oligonucleotide"
uaucuuuucaccuuaguguuugc

SEQ ID NO: 920 - RNA, 21 nt, Artificial Sequence
  source: /note="Description of Artificial Sequence: Synthetic oligonucleotide"
caaacacuaaggugaaaagau

SEQ ID NO: 921 - RNA, 23 nt, Artificial Sequence
  source: /note="Description of Artificial Sequence: Synthetic oligonucleotide"
aucuuuucaccuuaguguuugcu

SEQ ID NO: 922 - RNA, 21 nt, Artificial Sequence
  source: /note="Description of Artificial Sequence: Synthetic oligonucleotide"
agguagcacuggagagaauug

SEQ ID NO: 923 - RNA, 23 nt, Artificial Sequence
  source: /note="Description of Artificial Sequence: Synthetic oligonucleotide"
caauucucuccagugcuaccuuc

SEQ ID NO: 924 - RNA, 21 nt, Artificial Sequence
  source: /note="Description of Artificial Sequence: Synthetic oligonucleotide"
gguagcacuggagagaauugg

SEQ ID NO: 925 - RNA, 23 nt, Artificial Sequence
  source: /note="Description of Artificial Sequence: Synthetic oligonucleotide"
ccaauucucuccagugcuaccuu

SEQ ID NO: 926 - RNA, 21 nt, Artificial Sequence
  source: /note="Description of Artificial Sequence: Synthetic oligonucleotide"
gagaagguagcacuggagaga

SEQ ID NO: 927 - RNA, 23 nt, Artificial Sequence
  source: /note="Description of Artificial Sequence: Synthetic oligonucleotide"
ucucuccagugcuaccuucucaa

SEQ ID NO: 928 - RNA, 21 nt, Artificial Sequence
  source: /note="Description of Artificial Sequence: Synthetic oligonucleotide"
ugagaagguagcacuggagag

SEQ ID NO: 929 - RNA, 23 nt, Artificial Sequence
  source: /note="Description of Artificial Sequence: Synthetic oligonucleotide"
cucuccagugcuaccuucucaaa

SEQ ID NO: 930 - RNA, 21 nt, Artificial Sequence
  source: /note="Description of Artificial Sequence: Synthetic oligonucleotide"
aguggacuugcugcauaugug

SEQ ID NO: 931 - RNA, 23 nt, Artificial Sequence
  source: /note="Description of Artificial Sequence: Synthetic oligonucleotide"
cacauaugcagcaaguccacugu

SEQ ID NO: 932 - RNA, 21 nt, Artificial Sequence
  source: /note="Description of Artificial Sequence: Synthetic oligonucleotide"
guggacuugcugcauaugugg

SEQ ID NO: 933 - RNA, 23 nt, Artificial Sequence
  source: /note="Description of Artificial Sequence: Synthetic oligonucleotide"
ccacauaugcagcaaguccacug

SEQ ID NO: 934 - RNA, 21 nt, Artificial Sequence
  source: /note="Description of Artificial Sequence: Synthetic oligonucleotide"
cgacaguggacuugcugcaua

SEQ ID NO: 935 - RNA, 23 nt, Artificial Sequence
  source: /note="Description of Artificial Sequence: Synthetic oligonucleotide"
uaugcagcaaguccacugucguc

SEQ ID NO: 936 - RNA, 21 nt, Artificial Sequence
  source: /note="Description of Artificial Sequence: Synthetic oligonucleotide"
acgacaguggacuugcugcau

SEQ ID NO: 937 - RNA, 23 nt, Artificial Sequence
  source: /note="Description of Artificial Sequence: Synthetic oligonucleotide"
augcagcaaguccacugucgucu

SEQ ID NO: 938 - RNA, 21 nt, Artificial Sequence
  source: /note="Description of Artificial Sequence: Synthetic oligonucleotide"
aagguguucaagauguccucg

SEQ ID NO: 939 - RNA, 23 nt, Artificial Sequence
  source: /note="Description of Artificial Sequence: Synthetic oligonucleotide"
cgaggacaucuugaacaccuuuc

SEQ ID NO: 940 - RNA, 21 nt, Artificial Sequence
  source: /note="Description of Artificial Sequence: Synthetic oligonucleotide"
agguguucaagauguccucga

SEQ ID NO: 941 - RNA, 23 nt, Artificial Sequence
  source: /note="Description of Artificial Sequence: Synthetic oligonucleotide"
ucgaggacaucuugaacaccuuu

SEQ ID NO: 942 - RNA, 21 nt, Artificial Sequence
  source: /note="Description of Artificial Sequence: Synthetic oligonucleotide"
gagaaagguguucaagauguc

SEQ ID NO: 943 - RNA, 23 nt, Artificial Sequence
  source: /note="Description of Artificial Sequence: Synthetic oligonucleotide"
gacaucuugaacaccuuucuccc

SEQ ID NO: 944 - RNA, 21 nt, Artificial Sequence
  source: /note="Description of Artificial Sequence: Synthetic oligonucleotide"
ggagaaagguguucaagaugu

SEQ ID NO: 945 - RNA, 23 nt, Artificial Sequence
  source: /note="Description of Artificial Sequence: Synthetic oligonucleotide"
acaucuugaacaccuuucucccc

SEQ ID NO: 946 - RNA, 21 nt, Artificial Sequence
  source: /note="Description of Artificial Sequence: Synthetic oligonucleotide"
aaccgucuggaugaugugcgu

SEQ ID NO: 947 - RNA, 23 nt, Artificial Sequence
  source: /note="Description of Artificial Sequence: Synthetic oligonucleotide"
acgcacaucauccagacgguugc

SEQ ID NO: 948 - RNA, 21 nt, Artificial Sequence
  source: /note="Description of Artificial Sequence: Synthetic oligonucleotide"
accgucuggaugaugugcgua

SEQ ID NO: 949 - RNA, 23 nt, Artificial Sequence
  source: /note="Description of Artificial Sequence: Synthetic oligonucleotide"
uacgcacaucauccagacgguug

SEQ ID NO: 950 - RNA, 21 nt, Artificial Sequence
  source: /note="Description of Artificial Sequence: Synthetic oligonucleotide"
gggcaaccgucuggaugaugu

SEQ ID NO: 951 - RNA, 23 nt, Artificial Sequence
  source: /note="Description of Artificial Sequence: Synthetic oligonucleotide"
acaucauccagacgguugcccag

SEQ ID NO: 952 - RNA, 21 nt, Artificial Sequence
  source: /note="Description of Artificial Sequence: Synthetic oligonucleotide"
ugggcaaccgucuggaugaug

SEQ ID NO: 953 - RNA, 23 nt, Artificial Sequence
  source: /note="Description of Artificial Sequence: Synthetic oligonucleotide"
caucauccagacgguugcccagg

SEQ ID NO: 954 - RNA, 21 nt, Artificial Sequence
  source: /note="Description of Artificial Sequence: Synthetic oligonucleotide"
gaaacuuuggcugauaauauu

SEQ ID NO: 955 - RNA, 23 nt, Artificial Sequence
  source: /note="Description of Artificial Sequence: Synthetic oligonucleotide"
aauauuaucagccaaaguuucuu

SEQ ID NO: 956 - RNA, 21 nt, Artificial Sequence
  source: /note="Description of Artificial Sequence: Synthetic oligonucleotide"
aaacuuuggcugauaauauug

SEQ ID NO: 957 - RNA, 23 nt, Artificial Sequence
  source: /note="Description of Artificial Sequence: Synthetic oligonucleotide"
caauauuaucagccaaaguuucu

SEQ ID NO: 958 - RNA, 21 nt, Artificial Sequence
  source: /note="Description of Artificial Sequence: Synthetic oligonucleotide"
ugaagaaacuuuggcugauaa

SEQ ID NO: 959 - RNA, 23 nt, Artificial Sequence
  source: /note="Description of Artificial Sequence: Synthetic oligonucleotide"
uuaucagccaaaguuucuucauc

SEQ ID NO: 960 - RNA, 21 nt, Artificial Sequence
  source: /note="Description of Artificial Sequence: Synthetic oligonucleotide"
augaagaaacuuuggcugaua

SEQ ID NO: 961 - RNA, 23 nt, Artificial Sequence
  source: /note="Description of Artificial Sequence: Synthetic oligonucleotide"
uaucagccaaaguuucuucauca

SEQ ID NO: 962 - RNA, 21 nt, Artificial Sequence
  source: /note="Description of Artificial Sequence: Synthetic oligonucleotide"
aaagguguucaagauguccuc

SEQ ID NO: 963 - RNA, 23 nt, Artificial Sequence
  source: /note="Description of Artificial Sequence: Synthetic oligonucleotide"
gaggacaucuugaacaccuuucu

SEQ ID NO: 964 - RNA, 21 nt, Artificial Sequence
  source: /note="Description of Artificial Sequence: Synthetic oligonucleotide"
aagguguucaagauguccucg

SEQ ID NO: 965 - RNA, 23 nt, Artificial Sequence
  source: /note="Description of Artificial Sequence: Synthetic oligonucleotide"
cgaggacaucuugaacaccuuuc

SEQ ID NO: 966 - RNA, 21 nt, Artificial Sequence
  source: /note="Description of Artificial Sequence: Synthetic oligonucleotide"
ggagaaagguguucaagaugu

SEQ ID NO: 967 - RNA, 23 nt, Artificial Sequence
  source: /note="Description of Artificial Sequence: Synthetic oligonucleotide"
acaucuugaacaccuuucucccc

SEQ ID NO: 968 - RNA, 21 nt, Artificial Sequence
  source: /note="Description of Artificial Sequence: Synthetic oligonucleotide"
gggagaaagguguucaagaug

SEQ ID NO: 969 - RNA, 23 nt, Artificial Sequence
  source: /note="Description of Artificial Sequence: Synthetic oligonucleotide"
caucuugaacaccuuucuccccc

SEQ ID NO: 970 - RNA, 21 nt, Artificial Sequence
  source: /note="Description of Artificial Sequence: Synthetic oligonucleotide"
aaaucaguacuuccaaagucu

SEQ ID NO: 971 - RNA, 23 nt, Artificial Sequence
  source: /note="Description of Artificial Sequence: Synthetic oligonucleotide"
agacuuuggaaguacugauuuag

SEQ ID NO: 972 - RNA, 21 nt, Artificial Sequence
  source: /note="Description of Artificial Sequence: Synthetic oligonucleotide"
aaucaguacuuccaaagucua

SEQ ID NO: 973 - RNA, 23 nt, Artificial Sequence
  source: /note="Description of Artificial Sequence: Synthetic oligonucleotide"
uagacuuuggaaguacugauuua

SEQ ID NO: 974 - RNA, 21 nt, Artificial Sequence
  source: /note="Description of Artificial Sequence: Synthetic oligonucleotide"
ugcuaaaucaguacuuccaaa

SEQ ID NO: 975 - RNA, 23 nt, Artificial Sequence
  source: /note="Description of Artificial Sequence: Synthetic oligonucleotide"
uuuggaaguacugauuuagcaug

SEQ ID NO: 976 - RNA, 21 nt, Artificial Sequence
  source: /note="Description of Artificial Sequence: Synthetic oligonucleotide"
augcuaaaucaguacuuccaa

SEQ ID NO: 977 - RNA, 23 nt, Artificial Sequence
  source: /note="Description of Artificial Sequence: Synthetic oligonucleotide"
uuggaaguacugauuuagcaugu

SEQ ID NO: 978 - RNA, 21 nt, Artificial Sequence
  source: /note="Description of Artificial Sequence: Synthetic oligonucleotide"
acaucuuuagugucugaauau

SEQ ID NO: 979 - RNA, 23 nt, Artificial Sequence
  source: /note="Description of Artificial Sequence: Synthetic oligonucleotide"
auauucagacacuaaagauguga

SEQ ID NO: 980 - RNA, 21 nt, Artificial Sequence
  source: /note="Description of Artificial Sequence: Synthetic oligonucleotide"
caucuuuagugucugaauaua

SEQ ID NO: 981 - RNA, 23 nt, Artificial Sequence
  source: /note="Description of Artificial Sequence: Synthetic oligonucleotide"
uauauucagacacuaaagaugug

SEQ ID NO: 982 - RNA, 21 nt, Artificial Sequence
  source: /note="Description of Artificial Sequence: Synthetic oligonucleotide"
aaucacaucuuuagugucuga

SEQ ID NO: 983 - RNA, 23 nt, Artificial Sequence
  source: /note="Description of Artificial Sequence: Synthetic oligonucleotide"
ucagacacuaaagaugugauugg

SEQ ID NO: 984 - RNA, 21 nt, Artificial Sequence
  source: /note="Description of Artificial Sequence: Synthetic oligonucleotide"
caaucacaucuuuagugucug

SEQ ID NO: 985 - RNA, 23 nt, Artificial Sequence
  source: /note="Description of Artificial Sequence: Synthetic oligonucleotide"
cagacacuaaagaugugauugga

SEQ ID NO: 986 - RNA, 21 nt, Artificial Sequence
  source: /note="Description of Artificial Sequence: Synthetic oligonucleotide"
gcauguauuacuugacaaaga

SEQ ID NO: 987 - RNA, 23 nt, Artificial Sequence
  source: /note="Description of Artificial Sequence: Synthetic oligonucleotide"
ucuuugucaaguaauacaugcug

SEQ ID NO: 988 - RNA, 21 nt, Artificial Sequence
  source: /note="Description of Artificial Sequence: Synthetic oligonucleotide"
cauguauuacuugacaaagag

SEQ ID NO: 989 - RNA, 23 nt, Artificial Sequence
  source: /note="Description of Artificial Sequence: Synthetic oligonucleotide"
cucuuugucaaguaauacaugcu

SEQ ID NO: 990 - RNA, 21 nt, Artificial Sequence
  source: /note="Description of Artificial Sequence: Synthetic oligonucleotide"
uucagcauguauuacuugaca

SEQ ID NO: 991 - RNA, 23 nt, Artificial Sequence
  source: /note="Description of Artificial Sequence: Synthetic oligonucleotide"
ugucaaguaauacaugcugaaaa

SEQ ID NO: 992 - RNA, 21 nt, Artificial Sequence
  source: /note="Description of Artificial Sequence: Synthetic oligonucleotide"
uuucagcauguauuacuugac

SEQ ID NO: 993 - RNA, 23 nt, Artificial Sequence
  source: /note="Description of Artificial Sequence: Synthetic oligonucleotide"
gucaaguaauacaugcugaaaaa

SEQ ID NO: 994 - RNA, 21 nt, Artificial Sequence
  source: /note="Description of Artificial Sequence: Synthetic oligonucleotide"
auguuacuucuuagagagaaa

SEQ ID NO: 995 - RNA, 23 nt, Artificial Sequence
  source: /note="Description of Artificial Sequence: Synthetic oligonucleotide"
uuucucucuaagaaguaacauac

SEQ ID NO: 996 - RNA, 21 nt, Artificial Sequence
  source: /note="Description of Artificial Sequence: Synthetic oligonucleotide"
uguuacuucuuagagagaaau

SEQ ID NO: 997 - RNA, 23 nt, Artificial Sequence
  source: /note="Description of Artificial Sequence: Synthetic oligonucleotide"
auuucucucuaagaaguaacaua

SEQ ID NO: 998 - RNA, 21 nt, Artificial Sequence
  source: /note="Description of Artificial Sequence: Synthetic oligonucleotide"
auguauguuacuucuuagaga

SEQ ID NO: 999 - RNA, 23 nt, Artificial Sequence
  source: /note="Description of Artificial Sequence: Synthetic oligonucleotide"
ucucuaagaaguaacauacaucc

SEQ ID NO: 1000 - RNA, 21 nt, Artificial Sequence
  source: /note="Description of Artificial Sequence: Synthetic oligonucleotide"
gauguauguuacuucuuagag

SEQ ID NO: 1001 - RNA, 23 nt, Artificial Sequence
  source: /note="Description of Artificial Sequence: Synthetic oligonucleotide"
cucuaagaaguaacauacauccu

SEQ ID NO: 1002 - RNA, 21 nt, Artificial Sequence
  source: /note="Description of Artificial Sequence: Synthetic oligonucleotide"
acaacuuugagaagguagcac

SEQ ID NO: 1003 - RNA, 23 nt, Artificial Sequence
  source: /note="Description of Artificial Sequence: Synthetic oligonucleotide"
gugcuaccuucucaaaguuguga

SEQ ID NO: 1004 - RNA, 21 nt, Artificial Sequence
  source: /note="Description of Artificial Sequence: Synthetic oligonucleotide"
caacuuugagaagguagcacu

SEQ ID NO: 1005 - RNA, 23 nt, Artificial Sequence
  source: /note="Description of Artificial Sequence: Synthetic oligonucleotide"
agugcuaccuucucaaaguugug

SEQ ID NO: 1006 - RNA, 21 nt, Artificial Sequence
  source: /note="Description of Artificial Sequence: Synthetic oligonucleotide"
auucacaacuuugagaaggua

SEQ ID NO: 1007 - RNA, 23 nt, Artificial Sequence
  source: /note="Description of Artificial Sequence: Synthetic oligonucleotide"
uaccuucucaaaguugugaauca

SEQ ID NO: 1008 - RNA, 21 nt, Artificial Sequence
  source: /note="Description of Artificial Sequence: Synthetic oligonucleotide"
gauucacaacuuugagaaggu

SEQ ID NO: 1009 - RNA, 23 nt, Artificial Sequence
  source: /note="Description of Artificial Sequence: Synthetic oligonucleotide"
accuucucaaaguugugaaucag

SEQ ID NO: 1010 - RNA, 21 nt, Artificial Sequence
  source: /note="Description of Artificial Sequence: Synthetic oligonucleotide"
aacaugcuaaaucaguacuuc

SEQ ID NO: 1011 - RNA, 23 nt, Artificial Sequence
  source: /note="Description of Artificial Sequence: Synthetic oligonucleotide"
gaaguacugauuuagcauguugu

SEQ ID NO: 1012 - RNA, 21 nt, Artificial Sequence
  source: /note="Description of Artificial Sequence: Synthetic oligonucleotide"
acaugcuaaaucaguacuucc

SEQ ID NO: 1013 - RNA, 23 nt, Artificial Sequence
  source: /note="Description of Artificial Sequence: Synthetic oligonucleotide"
ggaaguacugauuuagcauguug

SEQ ID NO: 1014 - RNA, 21 nt, Artificial Sequence
  source: /note="Description of Artificial Sequence: Synthetic oligonucleotide"
gaacaacaugcuaaaucagua

SEQ ID NO: 1015 - RNA, 23 nt, Artificial Sequence
  source: /note="Description of Artificial Sequence: Synthetic oligonucleotide"
uacugauuuagcauguuguucau

SEQ ID NO: 1016 - RNA, 21 nt, Artificial Sequence
  source: /note="Description of Artificial Sequence: Synthetic oligonucleotide"
ugaacaacaugcuaaaucagu

SEQ ID NO: 1017 - RNA, 23 nt, Artificial Sequence
  source: /note="Description of Artificial Sequence: Synthetic oligonucleotide"
acugauuuagcauguuguucaua

SEQ ID NO: 1018 - RNA, 21 nt, Artificial Sequence
  source: /note="Description of Artificial Sequence: Synthetic oligonucleotide"
aaaccaguacuuuaucauuuu

SEQ ID NO: 1019 - RNA, 23 nt, Artificial Sequence
  source: /note="Description of Artificial Sequence: Synthetic oligonucleotide"
aaaaugauaaaguacugguuuca

SEQ ID NO: 1020 - RNA, 21 nt, Artificial Sequence
  source: /note="Description of Artificial Sequence: Synthetic oligonucleotide"
aaccaguacuuuaucauuuuc

SEQ ID NO: 1021 - RNA, 23 nt, Artificial Sequence
  source: /note="Description of Artificial Sequence: Synthetic oligonucleotide"
gaaaaugauaaaguacugguuuc

SEQ ID NO: 1022 - RNA, 21 nt, Artificial Sequence
  source: /note="Description of Artificial Sequence: Synthetic oligonucleotide"
uuugaaaccaguacuuuauca

SEQ ID NO: 1023 - RNA, 23 nt, Artificial Sequence
  source: /note="Description of Artificial Sequence: Synthetic oligonucleotide"
ugauaaaguacugguuucaaaau

SEQ ID NO: 1024 - RNA, 21 nt, Artificial Sequence
  source: /note="Description of Artificial Sequence: Synthetic oligonucleotide"
uuuugaaaccaguacuuuauc

SEQ ID NO: 1025 - RNA, 23 nt, Artificial Sequence
  source: /note="Description of Artificial Sequence: Synthetic oligonucleotide"
gauaaaguacugguuucaaaauu

SEQ ID NO: 1026 - RNA, 21 nt, Artificial Sequence
  source: /note="Description of Artificial Sequence: Synthetic oligonucleotide"
gagaagaugggcuacaaggcc

SEQ ID NO: 1027 - RNA, 23 nt, Artificial Sequence
  source: /note="Description of Artificial Sequence: Synthetic oligonucleotide"
ggccuuguagcccaucuucucug

SEQ ID NO: 1028 - RNA, 21 nt, Artificial Sequence
  source: /note="Description of Artificial Sequence: Synthetic oligonucleotide"
agaagaugggcuacaaggcca

SEQ ID NO: 1029 - RNA, 23 nt, Artificial Sequence
  source: /note="Description of Artificial Sequence: Synthetic oligonucleotide"
uggccuuguagcccaucuucucu

SEQ ID NO: 1030 - RNA, 21 nt, Artificial Sequence
  source: /note="Description of Artificial Sequence: Synthetic oligonucleotide"
ggcagagaagaugggcuacaa

SEQ ID NO: 1031 - RNA, 23 nt, Artificial Sequence
  source: /note="Description of Artificial Sequence: Synthetic oligonucleotide"
uuguagcccaucuucucugccug

SEQ ID NO: 1032 - RNA, 21 nt, Artificial Sequence
  source: /note="Description of Artificial Sequence: Synthetic oligonucleotide"
aggcagagaagaugggcuaca

SEQ ID NO: 1033 - RNA, 23 nt, Artificial Sequence
  source: /note="Description of Artificial Sequence: Synthetic oligonucleotide"
uguagcccaucuucucugccugc

SEQ ID NO: 1034 - RNA, 21 nt, Artificial Sequence
  source: /note="Description of Artificial Sequence: Synthetic oligonucleotide"
aacgggcaugauguugaguuc

SEQ ID NO: 1035 - RNA, 23 nt, Artificial Sequence
  source: /note="Description of Artificial Sequence: Synthetic oligonucleotide"
gaacucaacaucaugcccguucc

SEQ ID NO: 1036 - RNA, 21 nt, Artificial Sequence
  source: /note="Description of Artificial Sequence: Synthetic oligonucleotide"
acgggcaugauguugaguucc

SEQ ID NO: 1037 - RNA, 23 nt, Artificial Sequence
  source: /note="Description of Artificial Sequence: Synthetic oligonucleotide"
ggaacucaacaucaugcccguuc

SEQ ID NO: 1038 - RNA, 21 nt, Artificial Sequence
  source: /note="Description of Artificial Sequence: Synthetic oligonucleotide"
ugggaacgggcaugauguuga

SEQ ID NO: 1039 - RNA, 23 nt, Artificial Sequence
  source: /note="Description of Artificial Sequence: Synthetic oligonucleotide"
ucaacaucaugcccguucccagg

SEQ ID NO: 1040 - RNA, 21 nt, Artificial Sequence
  source: /note="Description of Artificial Sequence: Synthetic oligonucleotide"
cugggaacgggcaugauguug

SEQ ID NO: 1041 - RNA, 23 nt, Artificial Sequence
  source: /note="Description of Artificial Sequence: Synthetic oligonucleotide"
caacaucaugcccguucccaggg

SEQ ID NO: 1042 - RNA, 21 nt, Artificial Sequence
  source: /note="Description of Artificial Sequence: Synthetic oligonucleotide"
auguggcuaaagcaauagacc

SEQ ID NO: 1043 - RNA, 23 nt, Artificial Sequence
  source: /note="Description of Artificial Sequence: Synthetic oligonucleotide"
ggucuauugcuuuagccacauau

SEQ ID NO: 1044 - RNA, 21 nt, Artificial Sequence
  source: /note="Description of Artificial Sequence: Synthetic oligonucleotide"
uguggcuaaagcaauagaccc

SEQ ID NO: 1045 - RNA, 23 nt, Artificial Sequence
  source: /note="Description of Artificial Sequence: Synthetic oligonucleotide"
gggucuauugcuuuagccacaua

SEQ ID NO: 1046 - RNA, 21 nt, Artificial Sequence
  source: /note="Description of Artificial Sequence: Synthetic oligonucleotide"
gcauauguggcuaaagcaaua

SEQ ID NO: 1047 - RNA, 23 nt, Artificial Sequence
  source: /note="Description of Artificial Sequence: Synthetic oligonucleotide"
uauugcuuuagccacauaugcag

SEQ ID NO: 1048 - RNA, 21 nt, Artificial Sequence
  source: /note="Description of Artificial Sequence: Synthetic oligonucleotide"
ugcauauguggcuaaagcaau

SEQ ID NO: 1049 - RNA, 23 nt, Artificial Sequence
  source: /note="Description of Artificial Sequence: Synthetic oligonucleotide"
auugcuuuagccacauaugcagc

SEQ ID NO: 1050 - RNA, 21 nt, Artificial Sequence
  source: /note="Description of Artificial Sequence: Synthetic oligonucleotide"
aggaugcuccggaauguugcu

SEQ ID NO: 1051 - RNA, 23 nt, Artificial Sequence
  source: /note="Description of Artificial Sequence: Synthetic oligonucleotide"
agcaacauuccggagcauccuug

SEQ ID NO: 1052 - RNA, 21 nt, Artificial Sequence
  source: /note="Description of Artificial Sequence: Synthetic oligonucleotide"
ggaugcuccggaauguugcug

SEQ ID NO: 1053 - RNA, 23 nt, Artificial Sequence
  source: /note="Description of Artificial Sequence: Synthetic oligonucleotide"
cagcaacauuccggagcauccuu

SEQ ID NO: 1054 - RNA, 21 nt, Artificial Sequence
  source: /note="Description of Artificial Sequence: Synthetic oligonucleotide"
uccaaggaugcuccggaaugu

SEQ ID NO: 1055 - RNA, 23 nt, Artificial Sequence
  source: /note="Description of Artificial Sequence: Synthetic oligonucleotide"
acauuccggagcauccuuggaua

SEQ ID NO: 1056 - RNA, 21 nt, Artificial Sequence
  source: /note="Description of Artificial Sequence: Synthetic oligonucleotide"
auccaaggaugcuccggaaug

SEQ ID NO: 1057 - RNA, 23 nt, Artificial Sequence
  source: /note="Description of Artificial Sequence: Synthetic oligonucleotide"
cauuccggagcauccuuggauac

SEQ ID NO: 1058 - RNA, 21 nt, Artificial Sequence
  source: /note="Description of Artificial Sequence: Synthetic oligonucleotide"
ucacaucuuuagugucugaau

SEQ ID NO: 1059 - RNA, 23 nt, Artificial Sequence
  source: /note="Description of Artificial Sequence: Synthetic oligonucleotide"
auucagacacuaaagaugugauu

SEQ ID NO: 1060 - RNA, 21 nt, Artificial Sequence
  source: /note="Description of Artificial Sequence: Synthetic oligonucleotide"
cacaucuuuagugucugaaua

SEQ ID NO: 1061 - RNA, 23 nt, Artificial Sequence
  source: /note="Description of Artificial Sequence: Synthetic oligonucleotide"
uauucagacacuaaagaugugau

SEQ ID NO: 1062 - RNA, 21 nt, Artificial Sequence
  source: /note="Description of Artificial Sequence: Synthetic oligonucleotide"
ccaaucacaucuuuagugucu

SEQ ID NO: 1063 - RNA, 23 nt, Artificial Sequence
  source: /note="Description of Artificial Sequence: Synthetic oligonucleotide"
agacacuaaagaugugauuggaa

SEQ ID NO: 1064 - RNA, 21 nt, Artificial Sequence
  source: /note="Description of Artificial Sequence: Synthetic oligonucleotide"
uccaaucacaucuuuaguguc

SEQ ID NO: 1065 - RNA, 23 nt, Artificial Sequence
  source: /note="Description of Artificial Sequence: Synthetic oligonucleotide"
gacacuaaagaugugauuggaaa

SEQ ID NO: 1066 - RNA, 21 nt, Artificial Sequence
  source: /note="Description of Artificial Sequence: Synthetic oligonucleotide"
aaauguguuuagacaacguca

SEQ ID NO: 1067 - RNA, 23 nt, Artificial Sequence
  source: /note="Description of Artificial Sequence: Synthetic oligonucleotide"
ugacguugucuaaacacauuuuc

SEQ ID NO: 1068 - RNA, 21 nt, Artificial Sequence
  source: /note="Description of Artificial Sequence: Synthetic oligonucleotide"
aauguguuuagacaacgucau

SEQ ID NO: 1069 - RNA, 23 nt, Artificial Sequence
  source: /note="Description of Artificial Sequence: Synthetic oligonucleotide"
augacguugucuaaacacauuuu

SEQ ID NO: 1070 - RNA, 21 nt, Artificial Sequence
  source: /note="Description of Artificial Sequence: Synthetic oligonucleotide"
uugaaaauguguuuagacaac

SEQ ID NO: 1071 - RNA, 23 nt, Artificial Sequence
  source: /note="Description of Artificial Sequence: Synthetic oligonucleotide"
guugucuaaacacauuuucaaug

SEQ ID NO: 1072 - RNA, 21 nt, Artificial Sequence
  source: /note="Description of Artificial Sequence: Synthetic oligonucleotide"
auugaaaauguguuuagacaa

SEQ ID NO: 1073 - RNA, 23 nt, Artificial Sequence
  source: /note="Description of Artificial Sequence: Synthetic oligonucleotide"
uugucuaaacacauuuucaaugu

SEQ ID NO: 1074 - RNA, 21 nt, Artificial Sequence
  source: /note="Description of Artificial Sequence: Synthetic oligonucleotide"
uacuaaaggaagaauuccggu

SEQ ID NO: 1075 - RNA, 23 nt, Artificial Sequence
  source: /note="Description of Artificial Sequence: Synthetic oligonucleotide"
accggaauucuuccuuuaguauc

SEQ ID NO: 1076 - RNA, 21 nt, Artificial Sequence
  source: /note="Description of Artificial Sequence: Synthetic oligonucleotide"
acuaaaggaagaauuccgguu

SEQ ID NO: 1077 - RNA, 23 nt, Artificial Sequence
  source: /note="Description of Artificial Sequence: Synthetic oligonucleotide"
aaccggaauucuuccuuuaguau

SEQ ID NO: 1078 - RNA, 21 nt, Artificial Sequence
  source: /note="Description of Artificial Sequence: Synthetic oligonucleotide"
gagauacuaaaggaagaauuc

SEQ ID NO: 1079 - RNA, 23 nt, Artificial Sequence
  source: /note="Description of Artificial Sequence: Synthetic oligonucleotide"
gaauucuuccuuuaguaucucga

SEQ ID NO: 1080 - RNA, 21 nt, Artificial Sequence
  source: /note="Description of Artificial Sequence: Synthetic oligonucleotide"
cgagauacuaaaggaagaauu

SEQ ID NO: 1081 - RNA, 23 nt, Artificial Sequence
  source: /note="Description of Artificial Sequence: Synthetic oligonucleotide"
aauucuuccuuuaguaucucgag

SEQ ID NO: 1082 - RNA, 21 nt, Artificial Sequence
  source: /note="Description of Artificial Sequence: Synthetic oligonucleotide"
aacuuuggcugauaauauugc

SEQ ID NO: 1083 - RNA, 23 nt, Artificial Sequence
  source: /note="Description of Artificial Sequence: Synthetic oligonucleotide"
gcaauauuaucagccaaaguuuc

SEQ ID NO: 1084 - RNA, 21 nt, Artificial Sequence
  source: /note="Description of Artificial Sequence: Synthetic oligonucleotide"
acuuuggcugauaauauugca

SEQ ID NO: 1085 - RNA, 23 nt, Artificial Sequence
  source: /note="Description of Artificial Sequence: Synthetic oligonucleotide"
ugcaauauuaucagccaaaguuu

SEQ ID NO: 1086 - RNA, 21 nt, Artificial Sequence
  source: /note="Description of Artificial Sequence: Synthetic oligonucleotide"
aagaaacuuuggcugauaaua

SEQ ID NO: 1087 - RNA, 23 nt, Artificial Sequence
  source: /note="Description of Artificial Sequence: Synthetic oligonucleotide"
uauuaucagccaaaguuucuuca

SEQ ID NO: 1088 - RNA, 21 nt, Artificial Sequence
  source: /note="Description of Artificial Sequence: Synthetic oligonucleotide"
gaagaaacuuuggcugauaau

SEQ ID NO: 1089 - RNA, 23 nt, Artificial Sequence
  source: /note="Description of Artificial Sequence: Synthetic oligonucleotide"
auuaucagccaaaguuucuucau

SEQ ID NO: 1090 - RNA, 21 nt, Artificial Sequence
  source: /note="Description of Artificial Sequence: Synthetic oligonucleotide"
aaauggcugagaagacugaca

SEQ ID NO: 1091 - RNA, 23 nt, Artificial Sequence
  source: /note="Description of Artificial Sequence: Synthetic oligonucleotide"
ugucagucuucucagccauuuga

SEQ ID NO: 1092 - RNA, 21 nt, Artificial Sequence
  source: /note="Description of Artificial Sequence: Synthetic oligonucleotide"
aauggcugagaagacugacau

SEQ ID NO: 1093 - RNA, 23 nt, Artificial Sequence
  source: /note="Description of Artificial Sequence: Synthetic oligonucleotide"
augucagucuucucagccauuug

SEQ ID NO: 1094 - RNA, 21 nt, Artificial Sequence
  source: /note="Description of Artificial Sequence: Synthetic oligonucleotide"
uaucaaauggcugagaagacu

SEQ ID NO: 1095 - RNA, 23 nt, Artificial Sequence
  source: /note="Description of Artificial Sequence: Synthetic oligonucleotide"
agucuucucagccauuugauauc

SEQ ID NO: 1096 - RNA, 21 nt, Artificial Sequence
  source: /note="Description of Artificial Sequence: Synthetic oligonucleotide"
auaucaaauggcugagaagac

SEQ ID NO: 1097 - RNA, 23 nt, Artificial Sequence
  source: /note="Description of Artificial Sequence: Synthetic oligonucleotide"
gucuucucagccauuugauaucu

SEQ ID NO: 1098 - RNA, 21 nt, Artificial Sequence
  source: /note="Description of Artificial Sequence: Synthetic oligonucleotide"
gugguucuuaaauuguaagcu

SEQ ID NO: 1099 - RNA, 23 nt, Artificial Sequence
  source: /note="Description of Artificial Sequence: Synthetic oligonucleotide"
agcuuacaauuuaagaaccacug

SEQ ID NO: 1100 - RNA, 21 nt, Artificial Sequence
  source: /note="Description of Artificial Sequence: Synthetic oligonucleotide"
ugguucuuaaauuguaagcuc

SEQ ID NO: 1101 - RNA, 23 nt, Artificial Sequence
  source: /note="Description of Artificial Sequence: Synthetic oligonucleotide"
gagcuuacaauuuaagaaccacu

SEQ ID NO: 1102 - RNA, 21 nt, Artificial Sequence
  source: /note="Description of Artificial Sequence: Synthetic oligonucleotide"
aacagugguucuuaaauugua

SEQ ID NO: 1103 - RNA, 23 nt, Artificial Sequence
  source: /note="Description of Artificial Sequence: Synthetic oligonucleotide"
uacaauuuaagaaccacuguuuu

SEQ ID NO: 1104 - RNA, 21 nt, Artificial Sequence
  source: /note="Description of Artificial Sequence: Synthetic oligonucleotide"
aaacagugguucuuaaauugu

SEQ ID NO: 1105 - RNA, 23 nt, Artificial Sequence
  source: /note="Description of Artificial Sequence: Synthetic oligonucleotide"
acaauuuaagaaccacuguuuua

SEQ ID NO: 1106 - RNA, 21 nt, Artificial Sequence
  source: /note="Description of Artificial Sequence: Synthetic oligonucleotide"
aagucaucgacaagacauugg

SEQ ID NO: 1107 - RNA, 23 nt, Artificial Sequence
  source: /note="Description of Artificial Sequence: Synthetic oligonucleotide"
ccaaugucuugucgaugacuuuc

SEQ ID NO: 1108 - RNA, 21 nt, Artificial Sequence
  source: /note="Description of Artificial Sequence: Synthetic oligonucleotide"
agucaucgacaagacauuggu

SEQ ID NO: 1109 - RNA, 23 nt, Artificial Sequence
  source: /note="Description of Artificial Sequence: Synthetic oligonucleotide"
accaaugucuugucgaugacuuu

SEQ ID NO: 1110 - RNA, 21 nt, Artificial Sequence
  source: /note="Description of Artificial Sequence: Synthetic oligonucleotide"
gugaaagucaucgacaagaca

SEQ ID NO: 1111 - RNA, 23 nt, Artificial Sequence
  source: /note="Description of Artificial Sequence: Synthetic oligonucleotide"
ugucuugucgaugacuuucacau

SEQ ID NO: 1112 - RNA, 21 nt, Artificial Sequence
  source: /note="Description of Artificial Sequence: Synthetic oligonucleotide"
ugugaaagucaucgacaagac

SEQ ID NO: 1113 - RNA, 23 nt, Artificial Sequence
  source: /note="Description of Artificial Sequence: Synthetic oligonucleotide"
gucuugucgaugacuuucacauu

SEQ ID NO: 1114 - RNA, 21 nt, Artificial Sequence
  source: /note="Description of Artificial Sequence: Synthetic oligonucleotide"
gauaauauugcagcauuuucc

SEQ ID NO: 1115 - RNA, 23 nt, Artificial Sequence
  source: /note="Description of Artificial Sequence: Synthetic oligonucleotide"
ggaaaaugcugcaauauuaucag

SEQ ID NO: 1116 - RNA, 21 nt, Artificial Sequence
  source: /note="Description of Artificial Sequence: Synthetic oligonucleotide"
auaauauugcagcauuuucca

SEQ ID NO: 1117 - RNA, 23 nt, Artificial Sequence
  source: /note="Description of Artificial Sequence: Synthetic oligonucleotide"
uggaaaaugcugcaauauuauca

SEQ ID NO: 1118 - RNA, 21 nt, Artificial Sequence
  source: /note="Description of Artificial Sequence: Synthetic oligonucleotide"
ggcugauaauauugcagcauu

SEQ ID NO: 1119 - RNA, 23 nt, Artificial Sequence
  source: /note="Description of Artificial Sequence: Synthetic oligonucleotide"
aaugcugcaauauuaucagccaa

SEQ ID NO: 1120 - RNA, 21 nt, Artificial Sequence
  source: /note="Description of Artificial Sequence: Synthetic oligonucleotide"
uggcugauaauauugcagcau

SEQ ID NO: 1121 - RNA, 23 nt, Artificial Sequence
  source: /note="Description of Artificial Sequence: Synthetic oligonucleotide"
augcugcaauauuaucagccaaa

SEQ ID NO: 1122 - RNA, 21 nt, Artificial Sequence
  source: /note="Description of Artificial Sequence: Synthetic oligonucleotide"
gcuaauuuguaucaaugauua

SEQ ID NO: 1123 - RNA, 23 nt, Artificial Sequence
  source: /note="Description of Artificial Sequence: Synthetic oligonucleotide"
uaaucauugauacaaauuagccg

SEQ ID NO: 1124 - RNA, 21 nt, Artificial Sequence
  source: /note="Description of Artificial Sequence: Synthetic oligonucleotide"
cuaauuuguaucaaugauuau

SEQ ID NO: 1125 - RNA, 23 nt, Artificial Sequence
  source: /note="Description of Artificial Sequence: Synthetic oligonucleotide"
auaaucauugauacaaauuagcc

SEQ ID NO: 1126 - RNA, 21 nt, Artificial Sequence
  source: /note="Description of Artificial Sequence: Synthetic oligonucleotide"
cccggcuaauuuguaucaaug

SEQ ID NO: 1127 - RNA, 23 nt, Artificial Sequence
  source: /note="Description of Artificial Sequence: Synthetic oligonucleotide"
cauugauacaaauuagccggggg

SEQ ID NO: 1128 - RNA, 21 nt, Artificial Sequence
  source: /note="Description of Artificial Sequence: Synthetic oligonucleotide"
ccccggcuaauuuguaucaau

SEQ ID NO: 1129 - RNA, 23 nt, Artificial Sequence
  source: /note="Description of Artificial Sequence: Synthetic oligonucleotide"
auugauacaaauuagccggggga

SEQ ID NO: 1130 - RNA, 21 nt, Artificial Sequence
  source: /note="Description of Artificial Sequence: Synthetic oligonucleotide"
uaauuggugauacuucuuuga

SEQ ID NO: 1131 - RNA, 23 nt, Artificial Sequence
  source: /note="Description of Artificial Sequence: Synthetic oligonucleotide"
ucaaagaaguaucaccaauuacc

SEQ ID NO: 1132 - RNA, 21 nt, Artificial Sequence
  source: /note="Description of Artificial Sequence: Synthetic oligonucleotide"
aauuggugauacuucuuugaa

SEQ ID NO: 1133 - RNA, 23 nt, Artificial Sequence
  source: /note="Description of Artificial Sequence: Synthetic oligonucleotide"
uucaaagaaguaucaccaauuac

SEQ ID NO: 1134 - RNA, 21 nt, Artificial Sequence
  source: /note="Description of Artificial Sequence: Synthetic oligonucleotide"
gcgguaauuggugauacuucu

SEQ ID NO: 1135 - RNA, 23 nt, Artificial Sequence
  source: /note="Description of Artificial Sequence: Synthetic oligonucleotide"
agaaguaucaccaauuaccgcca

SEQ ID NO: 1136 - RNA, 21 nt, Artificial Sequence
  source: /note="Description of Artificial Sequence: Synthetic oligonucleotide"
ggcgguaauuggugauacuuc

SEQ ID NO: 1137 - RNA, 23 nt, Artificial Sequence
  source: /note="Description of Artificial Sequence: Synthetic oligonucleotide"
gaaguaucaccaauuaccgccac

SEQ ID NO: 1138 - RNA, 21 nt, Artificial Sequence
  source: /note="Description of Artificial Sequence: Synthetic oligonucleotide"
cagugguucuuaaauuguaag

SEQ ID NO: 1139 - RNA, 23 nt, Artificial Sequence
  source: /note="Description of Artificial Sequence: Synthetic oligonucleotide"
cuuacaauuuaagaaccacuguu

SEQ ID NO: 1140 - RNA, 21 nt, Artificial Sequence
  source: /note="Description of Artificial Sequence: Synthetic oligonucleotide"
agugguucuuaaauuguaagc

SEQ ID NO: 1141 - RNA, 23 nt, Artificial Sequence
  source: /note="Description of Artificial Sequence: Synthetic oligonucleotide"
gcuuacaauuuaagaaccacugu

SEQ ID NO: 1142 - RNA, 21 nt, Artificial Sequence
  source: /note="Description of Artificial Sequence: Synthetic oligonucleotide"
aaaacagugguucuuaaauug

SEQ ID NO: 1143 - RNA, 23 nt, Artificial Sequence
  source: /note="Description of Artificial Sequence: Synthetic oligonucleotide"
caauuuaagaaccacuguuuuaa

SEQ ID NO: 1144 - RNA, 21 nt, Artificial Sequence
  source: /note="Description of Artificial Sequence: Synthetic oligonucleotide"
uaaaacagugguucuuaaauu

SEQ ID NO: 1145 - RNA, 23 nt, Artificial Sequence
  source: /note="Description of Artificial Sequence: Synthetic oligonucleotide"
aauuuaagaaccacuguuuuaaa

SEQ ID NO: 1146 - RNA, 21 nt, Artificial Sequence
  source: /note="Description of Artificial Sequence: Synthetic oligonucleotide"
accuguauucuguuuacaugu

SEQ ID NO: 1147 - RNA, 23 nt, Artificial Sequence
  source: /note="Description of Artificial Sequence: Synthetic oligonucleotide"
acauguaaacagaauacagguua

SEQ ID NO: 1148 - RNA, 21 nt, Artificial Sequence
  source: /note="Description of Artificial Sequence: Synthetic oligonucleotide"
ccuguauucuguuuacauguc

SEQ ID NO: 1149 - RNA, 23 nt, Artificial Sequence
  source: /note="Description of Artificial Sequence: Synthetic oligonucleotide"
gacauguaaacagaauacagguu

SEQ ID NO: 1150 - RNA, 21 nt, Artificial Sequence
  source: /note="Description of Artificial Sequence: Synthetic oligonucleotide"
auuaaccuguauucuguuuac

SEQ ID NO: 1151 - RNA, 23 nt, Artificial Sequence
  source: /note="Description of Artificial Sequence: Synthetic oligonucleotide"
guaaacagaauacagguuaauaa

SEQ ID NO: 1152 - RNA, 21 nt, Artificial Sequence
  source: /note="Description of Artificial Sequence: Synthetic oligonucleotide"
uauuaaccuguauucuguuua

SEQ ID NO: 1153 - RNA, 23 nt, Artificial Sequence
  source: /note="Description of Artificial Sequence: Synthetic oligonucleotide"
uaaacagaauacagguuaauaaa

SEQ ID NO: 1154 - RNA, 21 nt, Artificial Sequence
  source: /note="Description of Artificial Sequence: Synthetic oligonucleotide"
aagaaacuuuggcugauaaua

SEQ ID NO: 1155 - RNA, 23 nt, Artificial Sequence
  source: /note="Description of Artificial Sequence: Synthetic oligonucleotide"
uauuaucagccaaaguuucuuca

SEQ ID NO: 1156 - RNA, 21 nt, Artificial Sequence
  source: /note="Description of Artificial Sequence: Synthetic oligonucleotide"
agaaacuuuggcugauaauau

SEQ ID NO: 1157 - RNA, 23 nt, Artificial Sequence
  source: /note="Description of Artificial Sequence: Synthetic oligonucleotide"
auauuaucagccaaaguuucuuc

SEQ ID NO: 1158 - RNA, 21 nt, Artificial Sequence
  source: /note="Description of Artificial Sequence: Synthetic oligonucleotide"
gaugaagaaacuuuggcugau

SEQ ID NO: 1159 - RNA, 23 nt, Artificial Sequence
  source: /note="Description of Artificial Sequence: Synthetic oligonucleotide"
aucagccaaaguuucuucaucau

SEQ ID NO: 1160 - RNA, 21 nt, Artificial Sequence
  source: /note="Description of Artificial Sequence: Synthetic oligonucleotide"
ugaugaagaaacuuuggcuga

SEQ ID NO: 1161 - RNA, 23 nt, Artificial Sequence
  source: /note="Description of Artificial Sequence: Synthetic oligonucleotide"
ucagccaaaguuucuucaucauu

SEQ ID NO: 1162 - RNA, 21 nt, Artificial Sequence
  source: /note="Description of Artificial Sequence: Synthetic oligonucleotide"
gaaagguguucaagauguccu

SEQ ID NO: 1163 - RNA, 23 nt, Artificial Sequence
  source: /note="Description of Artificial Sequence: Synthetic oligonucleotide"
aggacaucuugaacaccuuucuc

SEQ ID NO: 1164 - RNA, 21 nt, Artificial Sequence
  source: /note="Description of Artificial Sequence: Synthetic oligonucleotide"
aaagguguucaagauguccuc

SEQ ID NO: 1165 - RNA, 23 nt, Artificial Sequence
  source: /note="Description of Artificial Sequence: Synthetic oligonucleotide"
gaggacaucuugaacaccuuucu

SEQ ID NO: 1166 - RNA, 21 nt, Artificial Sequence
  source: /note="Description of Artificial Sequence: Synthetic oligonucleotide"
gggagaaagguguucaagaug

SEQ ID NO: 1167 - RNA, 23 nt, Artificial Sequence
  source: /note="Description of Artificial Sequence: Synthetic oligonucleotide"
caucuugaacaccuuucuccccc

SEQ ID NO: 1168 - RNA, 21 nt, Artificial Sequence
  source: /note="Description of Artificial Sequence: Synthetic oligonucleotide"
ggggagaaagguguucaagau

SEQ ID NO: 1169 - RNA, 23 nt, Artificial Sequence
  source: /note="Description of Artificial Sequence: Synthetic oligonucleotide"
aucuugaacaccuuucucccccu

SEQ ID NO: 1170 - RNA, 21 nt, Artificial Sequence
  source: /note="Description of Artificial Sequence: Synthetic oligonucleotide"
aucuuggugucgaaucauggg

SEQ ID NO: 1171 - RNA, 23 nt, Artificial Sequence
  source: /note="Description of Artificial Sequence: Synthetic oligonucleotide"
cccaugauucgacaccaagaucc

SEQ ID NO: 1172 - RNA, 21 nt, Artificial Sequence
  source: /note="Description of Artificial Sequence: Synthetic oligonucleotide"
ucuuggugucgaaucaugggg

SEQ ID NO: 1173 - RNA, 23 nt, Artificial Sequence
  source: /note="Description of Artificial Sequence: Synthetic oligonucleotide"
ccccaugauucgacaccaagauc

SEQ ID NO: 1174 - RNA, 21 nt, Artificial Sequence
  source: /note="Description of Artificial Sequence: Synthetic oligonucleotide"
ugggaucuuggugucgaauca

SEQ ID NO: 1175 - RNA, 23 nt, Artificial Sequence
  source: /note="Description of Artificial Sequence: Synthetic oligonucleotide"
ugauucgacaccaagaucccauu

SEQ ID NO: 1176 - RNA, 21 nt, Artificial Sequence
  source: /note="Description of Artificial Sequence: Synthetic oligonucleotide"
augggaucuuggugucgaauc

SEQ ID NO: 1177 - RNA, 23 nt, Artificial Sequence
  source: /note="Description of Artificial Sequence: Synthetic oligonucleotide"
gauucgacaccaagaucccauuc

SEQ ID NO: 1178 - RNA, 21 nt, Artificial Sequence
  source: /note="Description of Artificial Sequence: Synthetic oligonucleotide"
gcuacaaggccauauuuguga

SEQ ID NO: 1179 - RNA, 23 nt, Artificial Sequence
  source: /note="Description of Artificial Sequence: Synthetic oligonucleotide"
ucacaaauauggccuuguagccc

SEQ ID NO: 1180 - RNA, 21 nt, Artificial Sequence
  source: /note="Description of Artificial Sequence: Synthetic oligonucleotide"
cuacaaggccauauuugugac

SEQ ID NO: 1181 - RNA, 23 nt, Artificial Sequence
  source: /note="Description of Artificial Sequence: Synthetic oligonucleotide"
gucacaaauauggccuuguagcc

SEQ ID NO: 1182 - RNA, 21 nt, Artificial Sequence
  source: /note="Description of Artificial Sequence: Synthetic oligonucleotide"
augggcuacaaggccauauuu

SEQ ID NO: 1183 - RNA, 23 nt, Artificial Sequence
  source: /note="Description of Artificial Sequence: Synthetic oligonucleotide"
aaauauggccuuguagcccaucu

SEQ ID NO: 1184 - RNA, 21 nt, Artificial Sequence
  source: /note="Description of Artificial Sequence: Synthetic oligonucleotide"
gaugggcuacaaggccauauu

SEQ ID NO: 1185 - RNA, 23 nt, Artificial Sequence
  source: /note="Description of Artificial Sequence: Synthetic oligonucleotide"
aauauggccuuguagcccaucuu

SEQ ID NO: 1186 - RNA, 21 nt, Artificial Sequence
  source: /note="Description of Artificial Sequence: Synthetic oligonucleotide"
acuggagagaauuggaauggg

SEQ ID NO: 1187 - RNA, 23 nt, Artificial Sequence
  source: /note="Description of Artificial Sequence: Synthetic oligonucleotide"
cccauuccaauucucuccagugc

SEQ ID NO: 1188 - RNA, 21 nt, Artificial Sequence
  source: /note="Description of Artificial Sequence: Synthetic oligonucleotide"
cuggagagaauuggaaugggu

SEQ ID NO: 1189 - RNA, 23 nt, Artificial Sequence
  source: /note="Description of Artificial Sequence: Synthetic oligonucleotide"
acccauuccaauucucuccagug

SEQ ID NO: 1190 - RNA, 21 nt, Artificial Sequence
  source: /note="Description of Artificial Sequence: Synthetic oligonucleotide"
uagcacuggagagaauuggaa

SEQ ID NO: 1191 - RNA, 23 nt, Artificial Sequence
  source: /note="Description of Artificial Sequence: Synthetic oligonucleotide"
uuccaauucucuccagugcuacc

SEQ ID NO: 1192 - RNA, 21 nt, Artificial Sequence
  source: /note="Description of Artificial Sequence: Synthetic oligonucleotide"
guagcacuggagagaauugga

SEQ ID NO: 1193 - RNA, 23 nt, Artificial Sequence
  source: /note="Description of Artificial Sequence: Synthetic oligonucleotide"
uccaauucucuccagugcuaccu

SEQ ID NO: 1194 - RNA, 21 nt, Artificial Sequence
  source: /note="Description of Artificial Sequence: Synthetic oligonucleotide"
acaguggacacaccuuaccug

SEQ ID NO: 1195 - RNA, 23 nt, Artificial Sequence
  source: /note="Description of Artificial Sequence: Synthetic oligonucleotide"
cagguaagguguguccacuguca

SEQ ID NO: 1196 - RNA, 21 nt, Artificial Sequence
  source: /note="Description of Artificial Sequence: Synthetic oligonucleotide"
caguggacacaccuuaccugg

SEQ ID NO: 1197 - RNA, 23 nt, Artificial Sequence
  source: /note="Description of Artificial Sequence: Synthetic oligonucleotide"
ccagguaagguguguccacuguc

SEQ ID NO: 1198 - RNA, 21 nt, Artificial Sequence
  source: /note="Description of Artificial Sequence: Synthetic oligonucleotide"
ugugacaguggacacaccuua

SEQ ID NO: 1199 - RNA, 23 nt, Artificial Sequence
  source: /note="Description of Artificial Sequence: Synthetic oligonucleotide"
uaagguguguccacugucacaaa

SEQ ID NO: 1200 - RNA, 21 nt, Artificial Sequence
  source: /note="Description of Artificial Sequence: Synthetic oligonucleotide"
uugugacaguggacacaccuu

SEQ ID NO: 1201 - RNA, 23 nt, Artificial Sequence
  source: /note="Description of Artificial Sequence: Synthetic oligonucleotide"
aagguguguccacugucacaaau

SEQ ID NO: 1202 - RNA, 21 nt, Artificial Sequence
  source: /note="Description of Artificial Sequence: Synthetic oligonucleotide"
gaagacugacaucauugccaa

SEQ ID NO: 1203 - RNA, 23 nt, Artificial Sequence
  source: /note="Description of Artificial Sequence: Synthetic oligonucleotide"
uuggcaaugaugucagucuucuc

SEQ ID NO: 1204 - RNA, 21 nt, Artificial Sequence
  source: /note="Description of Artificial Sequence: Synthetic oligonucleotide"
aagacugacaucauugccaau

SEQ ID NO: 1205 - RNA, 23 nt, Artificial Sequence
  source: /note="Description of Artificial Sequence: Synthetic oligonucleotide"
auuggcaaugaugucagucuucu

SEQ ID NO: 1206 - RNA, 21 nt, Artificial Sequence
  source: /note="Description of Artificial Sequence: Synthetic oligonucleotide"
cugagaagacugacaucauug

SEQ ID NO: 1207 - RNA, 23 nt, Artificial Sequence
  source: /note="Description of Artificial Sequence: Synthetic oligonucleotide"
caaugaugucagucuucucagcc

SEQ ID NO: 1208 - RNA, 21 nt, Artificial Sequence
  source: /note="Description of Artificial Sequence: Synthetic oligonucleotide"
gcugagaagacugacaucauu

SEQ ID NO: 1209 - RNA, 23 nt, Artificial Sequence
  source: /note="Description of Artificial Sequence: Synthetic oligonucleotide"
aaugaugucagucuucucagcca

SEQ ID NO: 1210 - RNA, 21 nt, Artificial Sequence
  source: /note="Description of Artificial Sequence: Synthetic oligonucleotide"
gcucagguucaaaguguuggu

SEQ ID NO: 1211 - RNA, 23 nt, Artificial Sequence
  source: /note="Description of Artificial Sequence: Synthetic oligonucleotide"
accaacacuuugaaccugagcuu

SEQ ID NO: 1212 - RNA, 21 nt, Artificial Sequence
  source: /note="Description of Artificial Sequence: Synthetic oligonucleotide"
cucagguucaaaguguuggua

SEQ ID NO: 1213 - RNA, 23 nt, Artificial Sequence
  source: /note="Description of Artificial Sequence: Synthetic oligonucleotide"
uaccaacacuuugaaccugagcu

SEQ ID NO: 1214 - RNA, 21 nt, Artificial Sequence
  source: /note="Description of Artificial Sequence: Synthetic oligonucleotide"
guaagcucagguucaaagugu

SEQ ID NO: 1215 - RNA, 23 nt, Artificial Sequence
  source: /note="Description of Artificial Sequence: Synthetic oligonucleotide"
acacuuugaaccugagcuuacaa

SEQ ID NO: 1216 - RNA, 21 nt, Artificial Sequence
  source: /note="Description of Artificial Sequence: Synthetic oligonucleotide"
uguaagcucagguucaaagug

SEQ ID NO: 1217 - RNA, 23 nt, Artificial Sequence
  source: /note="Description of Artificial Sequence: Synthetic oligonucleotide"
cacuuugaaccugagcuuacaau

SEQ ID NO: 1218 - RNA, 21 nt, Artificial Sequence
  source: /note="Description of Artificial Sequence: Synthetic oligonucleotide"
auguauuacuugacaaagaga

SEQ ID NO: 1219 - RNA, 23 nt, Artificial Sequence
  source: /note="Description of Artificial Sequence: Synthetic oligonucleotide"
ucucuuugucaaguaauacaugc

SEQ ID NO: 1220 - RNA, 21 nt, Artificial Sequence
  source: /note="Description of Artificial Sequence: Synthetic oligonucleotide"
uguauuacuugacaaagagac

SEQ ID NO: 1221 - RNA, 23 nt, Artificial Sequence
  source: /note="Description of Artificial Sequence: Synthetic oligonucleotide"
gucucuuugucaaguaauacaug

SEQ ID NO: 1222 - RNA, 21 nt, Artificial Sequence
  source: /note="Description of Artificial Sequence: Synthetic oligonucleotide"
cagcauguauuacuugacaaa

SEQ ID NO: 1223 - RNA, 23 nt, Artificial Sequence
  source: /note="Description of Artificial Sequence: Synthetic oligonucleotide"
uuugucaaguaauacaugcugaa

SEQ ID NO: 1224 - RNA, 21 nt, Artificial Sequence
  source: /note="Description of Artificial Sequence: Synthetic oligonucleotide"
ucagcauguauuacuugacaa

SEQ ID NO: 1225 - RNA, 23 nt, Artificial Sequence
  source: /note="Description of Artificial Sequence: Synthetic oligonucleotide"
uugucaaguaauacaugcugaaa

SEQ ID NO: 1226 - RNA, 21 nt, Artificial Sequence
  source: /note="Description of Artificial Sequence: Synthetic oligonucleotide"
cugcaacuguauaucuacaag

SEQ ID NO: 1227 - RNA, 23 nt, Artificial Sequence
  source: /note="Description of Artificial Sequence: Synthetic oligonucleotide"
cuuguagauauacaguugcagcc

SEQ ID NO: 1228 - RNA, 21 nt, Artificial Sequence
  source: /note="Description of Artificial Sequence: Synthetic oligonucleotide"
ugcaacuguauaucuacaagg

SEQ ID NO: 1229 - RNA, 23 nt, Artificial Sequence
  source: /note="Description of Artificial Sequence: Synthetic oligonucleotide"
ccuuguagauauacaguugcagc

SEQ ID NO: 1230 - RNA, 21 nt, Artificial Sequence
  source: /note="Description of Artificial Sequence: Synthetic oligonucleotide"
uuggcugcaacuguauaucua

SEQ ID NO: 1231 - RNA, 23 nt, Artificial Sequence
  source: /note="Description of Artificial Sequence: Synthetic oligonucleotide"
uagauauacaguugcagccaacg

SEQ ID NO: 1232 - RNA, 21 nt, Artificial Sequence
  source: /note="Description of Artificial Sequence: Synthetic oligonucleotide"
guuggcugcaacuguauaucu

SEQ ID NO: 1233 - RNA, 23 nt, Artificial Sequence
  source: /note="Description of Artificial Sequence: Synthetic oligonucleotide"
agauauacaguugcagccaacga

SEQ ID NO: 1234 - RNA, 21 nt, Artificial Sequence
  source: /note="Description of Artificial Sequence: Synthetic oligonucleotide"
caaaugaugaagaaacuuugg

SEQ ID NO: 1235 - RNA, 23 nt, Artificial Sequence
  source: /note="Description of Artificial Sequence: Synthetic oligonucleotide"
ccaaaguuucuucaucauuugcc

SEQ ID NO: 1236 - RNA, 21 nt, Artificial Sequence
  source: /note="Description of Artificial Sequence: Synthetic oligonucleotide"
aaaugaugaagaaacuuuggc

SEQ ID NO: 1237 - RNA, 23 nt, Artificial Sequence
  source: /note="Description of Artificial Sequence: Synthetic oligonucleotide"
gccaaaguuucuucaucauuugc

SEQ ID NO: 1238 - RNA, 21 nt, Artificial Sequence
  source: /note="Description of Artificial Sequence: Synthetic oligonucleotide"
ggggcaaaugaugaagaaacu

SEQ ID NO: 1239 - RNA, 23 nt, Artificial Sequence
  source: /note="Description of Artificial Sequence: Synthetic oligonucleotide"
aguuucuucaucauuugccccag

SEQ ID NO: 1240 - RNA, 21 nt, Artificial Sequence
  source: /note="Description of Artificial Sequence: Synthetic oligonucleotide"
uggggcaaaugaugaagaaac

SEQ ID NO: 1241 - RNA, 23 nt, Artificial Sequence
  source: /note="Description of Artificial Sequence: Synthetic oligonucleotide"
guuucuucaucauuugccccaga

SEQ ID NO: 1242 - RNA, 21 nt, Artificial Sequence
  source: /note="Description of Artificial Sequence: Synthetic oligonucleotide"
caaagggugucguucuuuucc

SEQ ID NO: 1243 - RNA, 23 nt, Artificial Sequence
  source: /note="Description of Artificial Sequence: Synthetic oligonucleotide"
ggaaaagaacgacacccuuugua

SEQ ID NO: 1244 - RNA, 21 nt, Artificial Sequence
  source: /note="Description of Artificial Sequence: Synthetic oligonucleotide"
aaagggugucguucuuuucca

SEQ ID NO: 1245 - RNA, 23 nt, Artificial Sequence
  source: /note="Description of Artificial Sequence: Synthetic oligonucleotide"
uggaaaagaacgacacccuuugu

SEQ ID NO: 1246 - RNA, 21 nt, Artificial Sequence
  source: /note="Description of Artificial Sequence: Synthetic oligonucleotide"
aauacaaagggugucguucuu

SEQ ID NO: 1247 - RNA, 23 nt, Artificial Sequence
  source: /note="Description of Artificial Sequence: Synthetic oligonucleotide"
aagaacgacacccuuuguauuga

SEQ ID NO: 1248 - RNA, 21 nt, Artificial Sequence
  source: /note="Description of Artificial Sequence: Synthetic oligonucleotide"
caauacaaagggugucguucu

SEQ ID NO: 1249 - RNA, 23 nt, Artificial Sequence
  source: /note="Description of Artificial Sequence: Synthetic oligonucleotide"
agaacgacacccuuuguauugaa

SEQ ID NO: 1250 - RNA, 21 nt, Artificial Sequence
  source: /note="Description of Artificial Sequence: Synthetic oligonucleotide"
aaaggcacugauguucugaaa

SEQ ID NO: 1251 - RNA, 23 nt, Artificial Sequence
  source: /note="Description of Artificial Sequence: Synthetic oligonucleotide"
uuucagaacaucagugccuuucc

SEQ ID NO: 1252 - RNA, 21 nt, Artificial Sequence
  source: /note="Description of Artificial Sequence: Synthetic oligonucleotide"
aaggcacugauguucugaaag

SEQ ID NO: 1253 - RNA, 23 nt, Artificial Sequence
  source: /note="Description of Artificial Sequence: Synthetic oligonucleotide"
cuuucagaacaucagugccuuuc

SEQ ID NO: 1254 - RNA, 21 nt, Artificial Sequence
  source: /note="Description of Artificial Sequence: Synthetic oligonucleotide"
gcggaaaggcacugauguucu

SEQ ID NO: 1255 - RNA, 23 nt, Artificial Sequence
  source: /note="Description of Artificial Sequence: Synthetic oligonucleotide"
agaacaucagugccuuuccgcac

SEQ ID NO: 1256 - RNA, 21 nt, Artificial Sequence
  source: /note="Description of Artificial Sequence: Synthetic oligonucleotide"
ugcggaaaggcacugauguuc

SEQ ID NO: 1257 - RNA, 23 nt, Artificial Sequence
  source: /note="Description of Artificial Sequence: Synthetic oligonucleotide"
gaacaucagugccuuuccgcaca

SEQ ID NO: 1258 - RNA, 21 nt, Artificial Sequence
  source: /note="Description of Artificial Sequence: Synthetic oligonucleotide"
aaggaugcuccggaauguugc

SEQ ID NO: 1259 - RNA, 23 nt, Artificial Sequence
  source: /note="Description of Artificial Sequence: Synthetic oligonucleotide"
gcaacauuccggagcauccuugg

SEQ ID NO: 1260 - RNA, 21 nt, Artificial Sequence
  source: /note="Description of Artificial Sequence: Synthetic oligonucleotide"
aggaugcuccggaauguugcu

SEQ ID NO: 1261 - RNA, 23 nt, Artificial Sequence
  source: /note="Description of Artificial Sequence: Synthetic oligonucleotide"
agcaacauuccggagcauccuug

SEQ ID NO: 1262 - RNA, 21 nt, Artificial Sequence
  source: /note="Description of Artificial Sequence: Synthetic oligonucleotide"
auccaaggaugcuccggaaug

SEQ ID NO: 1263 - RNA, 23 nt, Artificial Sequence
  source: /note="Description of Artificial Sequence: Synthetic oligonucleotide"
cauuccggagcauccuuggauac

SEQ ID NO: 1264 - RNA, 21 nt, Artificial Sequence
  source: /note="Description of Artificial Sequence: Synthetic oligonucleotide"
uauccaaggaugcuccggaau

SEQ ID NO: 1265 - RNA, 23 nt, Artificial Sequence
  source: /note="Description of Artificial Sequence: Synthetic oligonucleotide"
auuccggagcauccuuggauaca

SEQ ID NO: 1266 - RNA, 21 nt, Artificial Sequence
  source: /note="Description of Artificial Sequence: Synthetic oligonucleotide"
aauggguggcgguaauuggug

SEQ ID NO: 1267 - RNA, 23 nt, Artificial Sequence
  source: /note="Description of Artificial Sequence: Synthetic oligonucleotide"
caccaauuaccgccacccauucc

SEQ ID NO: 1268 - RNA, 21 nt, Artificial Sequence
  source: /note="Description of Artificial Sequence: Synthetic oligonucleotide"
auggguggcgguaauugguga

SEQ ID NO: 1269 - RNA, 23 nt, Artificial Sequence
  source: /note="Description of Artificial Sequence: Synthetic oligonucleotide"
ucaccaauuaccgccacccauuc

SEQ ID NO: 1270 - RNA, 21 nt, Artificial Sequence
  source: /note="Description of Artificial Sequence: Synthetic oligonucleotide"
uuggaauggguggcgguaauu

SEQ ID NO: 1271 - RNA, 23 nt, Artificial Sequence
  source: /note="Description of Artificial Sequence: Synthetic oligonucleotide"
aauuaccgccacccauuccaauu

SEQ ID NO: 1272 - RNA, 21 nt, Artificial Sequence
  source: /note="Description of Artificial Sequence: Synthetic oligonucleotide"
auuggaauggguggcgguaau

SEQ ID NO: 1273 - RNA, 23 nt, Artificial Sequence
  source: /note="Description of Artificial Sequence: Synthetic oligonucleotide"
auuaccgccacccauuccaauuc

SEQ ID NO: 1274 - RNA, 21 nt, Artificial Sequence
  source: /note="Description of Artificial Sequence: Synthetic oligonucleotide"
ggaaaggcacugauguucuga

SEQ ID NO: 1275 - RNA, 23 nt, Artificial Sequence
  source: /note="Description of Artificial Sequence: Synthetic oligonucleotide"
ucagaacaucagugccuuuccgc

SEQ ID NO: 1276 - RNA, 21 nt, Artificial Sequence
  source: /note="Description of Artificial Sequence: Synthetic oligonucleotide"
gaaaggcacugauguucugaa

SEQ ID NO: 1277 - RNA, 23 nt, Artificial Sequence
  source: /note="Description of Artificial Sequence: Synthetic oligonucleotide"
uucagaacaucagugccuuuccg

SEQ ID NO: 1278 - RNA, 21 nt, Artificial Sequence
  source: /note="Description of Artificial Sequence: Synthetic oligonucleotide"
gugcggaaaggcacugauguu

SEQ ID NO: 1279 - RNA, 23 nt, Artificial Sequence
  source: /note="Description of Artificial Sequence: Synthetic oligonucleotide"
aacaucagugccuuuccgcacac

SEQ ID NO: 1280 - RNA, 21 nt, Artificial Sequence
  source: /note="Description of Artificial Sequence: Synthetic oligonucleotide"
ugugcggaaaggcacugaugu

SEQ ID NO: 1281 - RNA, 23 nt, Artificial Sequence
  source: /note="Description of Artificial Sequence: Synthetic oligonucleotide"
acaucagugccuuuccgcacacc

SEQ ID NO: 1282 - RNA, 21 nt, Artificial Sequence
  source: /note="Description of Artificial Sequence: Synthetic oligonucleotide"
aauuguaagcucagguucaaa

SEQ ID NO: 1283 - RNA, 23 nt, Artificial Sequence
  source: /note="Description of Artificial Sequence: Synthetic oligonucleotide"
uuugaaccugagcuuacaauuua

SEQ ID NO: 1284 - RNA, 21 nt, Artificial Sequence
  source: /note="Description of Artificial Sequence: Synthetic oligonucleotide"
auuguaagcucagguucaaag

SEQ ID NO: 1285 - RNA, 23 nt, Artificial Sequence
  source: /note="Description of Artificial Sequence: Synthetic oligonucleotide"
cuuugaaccugagcuuacaauuu

SEQ ID NO: 1286 - RNA, 21 nt, Artificial Sequence
  source: /note="Description of Artificial Sequence: Synthetic oligonucleotide"
cuuaaauuguaagcucagguu

SEQ ID NO: 1287 - RNA, 23 nt, Artificial Sequence
  source: /note="Description of Artificial Sequence: Synthetic oligonucleotide"
aaccugagcuuacaauuuaagaa

SEQ ID NO: 1288 - RNA, 21 nt, Artificial Sequence
  source: /note="Description of Artificial Sequence: Synthetic oligonucleotide"
ucuuaaauuguaagcucaggu

SEQ ID NO: 1289 - RNA, 23 nt, Artificial Sequence
  source: /note="Description of Artificial Sequence: Synthetic oligonucleotide"
accugagcuuacaauuuaagaac

SEQ ID NO: 1290 - RNA, 21 nt, Artificial Sequence
  source: /note="Description of Artificial Sequence: Synthetic oligonucleotide"
gcaaacacuaaggugaaaaga

SEQ ID NO: 1291 - RNA, 23 nt, Artificial Sequence
  source: /note="Description of Artificial Sequence: Synthetic oligonucleotide"
ucuuuucaccuuaguguuugcua

SEQ ID NO: 1292 - RNA, 21 nt, Artificial Sequence
  source: /note="Description of Artificial Sequence: Synthetic oligonucleotide"
caaacacuaaggugaaaagau

SEQ ID NO: 1293 - RNA, 23 nt, Artificial Sequence
  source: /note="Description of Artificial Sequence: Synthetic oligonucleotide"
aucuuuucaccuuaguguuugcu

SEQ ID NO: 1294 - RNA, 21 nt, Artificial Sequence
  source: /note="Description of Artificial Sequence: Synthetic oligonucleotide"
gguagcaaacacuaaggugaa

SEQ ID NO: 1295 - RNA, 23 nt, Artificial Sequence
  source: /note="Description of Artificial Sequence: Synthetic oligonucleotide"
uucaccuuaguguuugcuaccuc

SEQ ID NO: 1296 - RNA, 21 nt, Artificial Sequence
  source: /note="Description of Artificial Sequence: Synthetic oligonucleotide"
agguagcaaacacuaagguga

SEQ ID NO: 1297 - RNA, 23 nt, Artificial Sequence
  source: /note="Description of Artificial Sequence: Synthetic oligonucleotide"
ucaccuuaguguuugcuaccucc

SEQ ID NO: 1298 - RNA, 21 nt, Artificial Sequence
  source: /note="Description of Artificial Sequence: Synthetic oligonucleotide"
agguagcaaacacuaagguga

SEQ ID NO: 1299 - RNA, 23 nt, Artificial Sequence
  source: /note="Description of Artificial Sequence: Synthetic oligonucleotide"
ucaccuuaguguuugcuaccucc

SEQ ID NO: 1300 - RNA, 21 nt, Artificial Sequence
  source: /note="Description of Artificial Sequence: Synthetic oligonucleotide"
gguagcaaacacuaaggugaa

SEQ ID NO: 1301 - RNA, 23 nt, Artificial Sequence
  source: /note="Description of Artificial Sequence: Synthetic oligonucleotide"
uucaccuuaguguuugcuaccuc

SEQ ID NO: 1302 - RNA, 21 nt, Artificial Sequence
  source: /note="Description of Artificial Sequence: Synthetic oligonucleotide"
uuggagguagcaaacacuaag

SEQ ID NO: 1303 - RNA, 23 nt, Artificial Sequence
  source: /note="Description of Artificial Sequence: Synthetic oligonucleotide"
cuuaguguuugcuaccuccaauu

SEQ ID NO: 1304 - RNA, 21 nt, Artificial Sequence
  source: /note="Description of Artificial Sequence: Synthetic oligonucleotide"
auuggagguagcaaacacuaa

SEQ ID NO: 1305 - RNA, 23 nt, Artificial Sequence
  source: /note="Description of Artificial Sequence: Synthetic oligonucleotide"
uuaguguuugcuaccuccaauuu

SEQ ID NO: 1306 - RNA, 21 nt, Artificial Sequence
  source: /note="Description of Artificial Sequence: Synthetic oligonucleotide"
uaaagugcuguauccuuuagu

SEQ ID NO: 1307 - RNA, 23 nt, Artificial Sequence
  source: /note="Description of Artificial Sequence: Synthetic oligonucleotide"
acuaaaggauacagcacuuuagc

SEQ ID NO: 1308 - RNA, 21 nt, Artificial Sequence
  source: /note="Description of Artificial Sequence: Synthetic oligonucleotide"
aaagugcuguauccuuuagua

SEQ ID NO: 1309 - RNA, 23 nt, Artificial Sequence
  source: /note="Description of Artificial Sequence: Synthetic oligonucleotide"
uacuaaaggauacagcacuuuag

SEQ ID NO: 1310 - RNA, 21 nt, Artificial Sequence
  source: /note="Description of Artificial Sequence: Synthetic oligonucleotide"
aggcuaaagugcuguauccuu

SEQ ID NO: 1311 - RNA, 23 nt, Artificial Sequence
  source: /note="Description of Artificial Sequence: Synthetic oligonucleotide"
aaggauacagcacuuuagccugc

SEQ ID NO: 1312 - RNA, 21 nt, Artificial Sequence
  source: /note="Description of Artificial Sequence: Synthetic oligonucleotide"
caggcuaaagugcuguauccu

SEQ ID NO: 1313 - RNA, 23 nt, Artificial Sequence
  source: /note="Description of Artificial Sequence: Synthetic oligonucleotide"
aggauacagcacuuuagccugcc

SEQ ID NO: 1314 - RNA, 21 nt, Artificial Sequence
  source: /note="Description of Artificial Sequence: Synthetic oligonucleotide"
aagacauuggugaggaaaaau

SEQ ID NO: 1315 - RNA, 23 nt, Artificial Sequence
  source: /note="Description of Artificial Sequence: Synthetic oligonucleotide"
auuuuuccucaccaaugucuugu

SEQ ID NO: 1316 - RNA, 21 nt, Artificial Sequence
  source: /note="Description of Artificial Sequence: Synthetic oligonucleotide"
agacauuggugaggaaaaauc

SEQ ID NO: 1317 - RNA, 23 nt, Artificial Sequence
  source: /note="Description of Artificial Sequence: Synthetic oligonucleotide"
gauuuuuccucaccaaugucuug

SEQ ID NO: 1318 - RNA, 21 nt, Artificial Sequence
  source: /note="Description of Artificial Sequence: Synthetic oligonucleotide"
cgacaagacauuggugaggaa

SEQ ID NO: 1319 - RNA, 23 nt, Artificial Sequence
  source: /note="Description of Artificial Sequence: Synthetic oligonucleotide"
uuccucaccaaugucuugucgau

SEQ ID NO: 1320 - RNA, 21 nt, Artificial Sequence
  source: /note="Description of Artificial Sequence: Synthetic oligonucleotide"
ucgacaagacauuggugagga

SEQ ID NO: 1321 - RNA, 23 nt, Artificial Sequence
  source: /note="Description of Artificial Sequence: Synthetic oligonucleotide"
uccucaccaaugucuugucgaug

SEQ ID NO: 1322 - RNA, 21 nt, Artificial Sequence
  source: /note="Description of Artificial Sequence: Synthetic oligonucleotide"
aagauguccucgagauacuaa

SEQ ID NO: 1323 - RNA, 23 nt, Artificial Sequence
  source: /note="Description of Artificial Sequence: Synthetic oligonucleotide"
uuaguaucucgaggacaucuuga

SEQ ID NO: 1324 - RNA, 21 nt, Artificial Sequence
  source: /note="Description of Artificial Sequence: Synthetic oligonucleotide"
agauguccucgagauacuaaa

SEQ ID NO: 1325 - RNA, 23 nt, Artificial Sequence
  source: /note="Description of Artificial Sequence: Synthetic oligonucleotide"
uuuaguaucucgaggacaucuug

SEQ ID NO: 1326 - RNA, 21 nt, Artificial Sequence
  source: /note="Description of Artificial Sequence: Synthetic oligonucleotide"
guucaagauguccucgagaua

SEQ ID NO: 1327 - RNA, 23 nt, Artificial Sequence
  source: /note="Description of Artificial Sequence: Synthetic oligonucleotide"
uaucucgaggacaucuugaacac

SEQ ID NO: 1328 - RNA, 21 nt, Artificial Sequence
  source: /note="Description of Artificial Sequence: Synthetic oligonucleotide"
uguucaagauguccucgagau

SEQ ID NO: 1329 - RNA, 23 nt, Artificial Sequence
  source: /note="Description of Artificial Sequence: Synthetic oligonucleotide"
aucucgaggacaucuugaacacc

SEQ ID NO: 1330 - RNA, 21 nt, Artificial Sequence
  source: /note="Description of Artificial Sequence: Synthetic oligonucleotide"
gagaaagguguucaagauguc

SEQ ID NO: 1331 - RNA, 23 nt, Artificial Sequence
  source: /note="Description of Artificial Sequence: Synthetic oligonucleotide"
gacaucuugaacaccuuucuccc

SEQ ID NO: 1332 - RNA, 21 nt, Artificial Sequence
  source: /note="Description of Artificial Sequence: Synthetic oligonucleotide"
agaaagguguucaagaugucc

SEQ ID NO: 1333 - RNA, 23 nt, Artificial Sequence
  source: /note="Description of Artificial Sequence: Synthetic oligonucleotide"
ggacaucuugaacaccuuucucc

SEQ ID NO: 1334 - RNA, 21 nt, Artificial Sequence
  source: /note="Description of Artificial Sequence: Synthetic oligonucleotide"
gggggagaaagguguucaaga

SEQ ID NO: 1335 - RNA, 23 nt, Artificial Sequence
  source: /note="Description of Artificial Sequence: Synthetic oligonucleotide"
ucuugaacaccuuucucccccug

SEQ ID NO: 1336 - RNA, 21 nt, Artificial Sequence
  source: /note="Description of Artificial Sequence: Synthetic oligonucleotide"
agggggagaaagguguucaag

SEQ ID NO: 1337 - RNA, 23 nt, Artificial Sequence
  source: /note="Description of Artificial Sequence: Synthetic oligonucleotide"
cuugaacaccuuucucccccugg

SEQ ID NO: 1338 - RNA, 21 nt, Artificial Sequence
  source: /note="Description of Artificial Sequence: Synthetic oligonucleotide"
gcugggaagauaucaaauggc

SEQ ID NO: 1339 - RNA, 23 nt, Artificial Sequence
  source: /note="Description of Artificial Sequence: Synthetic oligonucleotide"
gccauuugauaucuucccagcug

SEQ ID NO: 1340 - RNA, 21 nt, Artificial Sequence
  source: /note="Description of Artificial Sequence: Synthetic oligonucleotide"
cugggaagauaucaaauggcu

SEQ ID NO: 1341 - RNA, 23 nt, Artificial Sequence
  source: /note="Description of Artificial Sequence: Synthetic oligonucleotide"
agccauuugauaucuucccagcu

SEQ ID NO: 1342 - RNA, 21 nt, Artificial Sequence
  source: /note="Description of Artificial Sequence: Synthetic oligonucleotide"
aucagcugggaagauaucaaa

SEQ ID NO: 1343 - RNA, 23 nt, Artificial Sequence
  source: /note="Description of Artificial Sequence: Synthetic oligonucleotide"
uuugauaucuucccagcugauag

SEQ ID NO: 1344 - RNA, 21 nt, Artificial Sequence
  source: /note="Description of Artificial Sequence: Synthetic oligonucleotide"
uaucagcugggaagauaucaa

SEQ ID NO: 1345 - RNA, 23 nt, Artificial Sequence
  source: /note="Description of Artificial Sequence: Synthetic oligonucleotide"
uugauaucuucccagcugauaga

SEQ ID NO: 1346 - RNA, 21 nt, Artificial Sequence
  source: /note="Description of Artificial Sequence: Synthetic oligonucleotide"
ucugucgacuucuguuuuagg

SEQ ID NO: 1347 - RNA, 23 nt, Artificial Sequence
  source: /note="Description of Artificial Sequence: Synthetic oligonucleotide"
ccuaaaacagaagucgacagauc

SEQ ID NO: 1348 - RNA, 21 nt, Artificial Sequence
  source: /note="Description of Artificial Sequence: Synthetic oligonucleotide"
cugucgacuucuguuuuagga

SEQ ID NO: 1349 - RNA, 23 nt, Artificial Sequence
  source: /note="Description of Artificial Sequence: Synthetic oligonucleotide"
uccuaaaacagaagucgacagau

SEQ ID NO: 1350 - RNA, 21 nt, Artificial Sequence
  source: /note="Description of Artificial Sequence: Synthetic oligonucleotide"
cagaucugucgacuucuguuu

SEQ ID NO: 1351 - RNA, 23 nt, Artificial Sequence
  source: /note="Description of Artificial Sequence: Synthetic oligonucleotide"
aaacagaagucgacagaucuguu

SEQ ID NO: 1352 - RNA, 21 nt, Artificial Sequence
  source: /note="Description of Artificial Sequence: Synthetic oligonucleotide"
acagaucugucgacuucuguu

SEQ ID NO: 1353 - RNA, 23 nt, Artificial Sequence
  source: /note="Description of Artificial Sequence: Synthetic oligonucleotide"
aacagaagucgacagaucuguuu

SEQ ID NO: 1354 - RNA, 21 nt, Artificial Sequence
  source: /note="Description of Artificial Sequence: Synthetic oligonucleotide"
uacuucuuugaauguagauuu

SEQ ID NO: 1355 - RNA, 23 nt, Artificial Sequence
  source: /note="Description of Artificial Sequence: Synthetic oligonucleotide"
aaaucuacauucaaagaaguauc

SEQ ID NO: 1356 - RNA, 21 nt, Artificial Sequence
  source: /note="Description of Artificial Sequence: Synthetic oligonucleotide"
acuucuuugaauguagauuuc

SEQ ID NO: 1357 - RNA, 23 nt, Artificial Sequence
  source: /note="Description of Artificial Sequence: Synthetic oligonucleotide"
gaaaucuacauucaaagaaguau

SEQ ID NO: 1358 - RNA, 21 nt, Artificial Sequence
  source: /note="Description of Artificial Sequence: Synthetic oligonucleotide"
gugauacuucuuugaauguag

SEQ ID NO: 1359 - RNA, 23 nt, Artificial Sequence
  source: /note="Description of Artificial Sequence: Synthetic oligonucleotide"
cuacauucaaagaaguaucacca

SEQ ID NO: 1360 - RNA, 21 nt, Artificial Sequence
  source: /note="Description of Artificial Sequence: Synthetic oligonucleotide"
ggugauacuucuuugaaugua

SEQ ID NO: 1361 - RNA, 23 nt, Artificial Sequence
  source: /note="Description of Artificial Sequence: Synthetic oligonucleotide"
uacauucaaagaaguaucaccaa

SEQ ID NO: 1362 - RNA, 21 nt, Artificial Sequence
  source: /note="Description of Artificial Sequence: Synthetic oligonucleotide"
ugggaagauaucaaauggcug

SEQ ID NO: 1363 - RNA, 23 nt, Artificial Sequence
  source: /note="Description of Artificial Sequence: Synthetic oligonucleotide"
cagccauuugauaucuucccagc

SEQ ID NO: 1364 - RNA, 21 nt, Artificial Sequence
  source: /note="Description of Artificial Sequence: Synthetic oligonucleotide"
gggaagauaucaaauggcuga

SEQ ID NO: 1365 - RNA, 23 nt, Artificial Sequence
  source: /note="Description of Artificial Sequence: Synthetic oligonucleotide"
ucagccauuugauaucuucccag

SEQ ID NO: 1366 - RNA, 21 nt, Artificial Sequence
  source: /note="Description of Artificial Sequence: Synthetic oligonucleotide"
cagcugggaagauaucaaaug

SEQ ID NO: 1367 - RNA, 23 nt, Artificial Sequence
  source: /note="Description of Artificial Sequence: Synthetic oligonucleotide"
cauuugauaucuucccagcugau

SEQ ID NO: 1368 - RNA, 21 nt, Artificial Sequence
  source: /note="Description of Artificial Sequence: Synthetic oligonucleotide"
ucagcugggaagauaucaaau

SEQ ID NO: 1369 - RNA, 23 nt, Artificial Sequence
  source: /note="Description of Artificial Sequence: Synthetic oligonucleotide"
auuugauaucuucccagcugaua

SEQ ID NO: 1370 - RNA, 21 nt, Artificial Sequence
  source: /note="Description of Artificial Sequence: Synthetic oligonucleotide"
uccaaagucuauauaugacua

SEQ ID NO: 1371 - RNA, 23 nt, Artificial Sequence
  source: /note="Description of Artificial Sequence: Synthetic oligonucleotide"
uagucauauauagacuuuggaag

SEQ ID NO: 1372 - RNA, 21 nt, Artificial Sequence
  source: /note="Description of Artificial Sequence: Synthetic oligonucleotide"
ccaaagucuauauaugacuau

SEQ ID NO: 1373 - RNA, 23 nt, Artificial Sequence
  source: /note="Description of Artificial Sequence: Synthetic oligonucleotide"
auagucauauauagacuuuggaa

SEQ ID NO: 1374 - RNA, 21 nt, Artificial Sequence
  source: /note="Description of Artificial Sequence: Synthetic oligonucleotide"
uacuuccaaagucuauauaug

SEQ ID NO: 1375 - RNA, 23 nt, Artificial Sequence
  source: /note="Description of Artificial Sequence: Synthetic oligonucleotide"
cauauauagacuuuggaaguacu

SEQ ID NO: 1376 - RNA, 21 nt, Artificial Sequence
  source: /note="Description of Artificial Sequence: Synthetic oligonucleotide"
guacuuccaaagucuauauau

SEQ ID NO: 1377 - RNA, 23 nt, Artificial Sequence
  source: /note="Description of Artificial Sequence: Synthetic oligonucleotide"
auauauagacuuuggaaguacug

SEQ ID NO: 1378 - RNA, 21 nt, Artificial Sequence
  source: /note="Description of Artificial Sequence: Synthetic oligonucleotide"
uuaugaacaacaugcuaaauc

SEQ ID NO: 1379 - RNA, 23 nt, Artificial Sequence
  source: /note="Description of Artificial Sequence: Synthetic oligonucleotide"
gauuuagcauguuguucauaauc

SEQ ID NO: 1380 - RNA, 21 nt, Artificial Sequence
  source: /note="Description of Artificial Sequence: Synthetic oligonucleotide"
uaugaacaacaugcuaaauca

SEQ ID NO: 1381 - RNA, 23 nt, Artificial Sequence
  source: /note="Description of Artificial Sequence: Synthetic oligonucleotide"
ugauuuagcauguuguucauaau

SEQ ID NO: 1382 - RNA, 21 nt, Artificial Sequence
  source: /note="Description of Artificial Sequence: Synthetic oligonucleotide"
augauuaugaacaacaugcua

SEQ ID NO: 1383 - RNA, 23 nt, Artificial Sequence
  source: /note="Description of Artificial Sequence: Synthetic oligonucleotide"
uagcauguuguucauaaucauug

SEQ ID NO: 1384 - RNA, 21 nt, Artificial Sequence
  source: /note="Description of Artificial Sequence: Synthetic oligonucleotide"
aaugauuaugaacaacaugcu

SEQ ID NO: 1385 - RNA, 23 nt, Artificial Sequence
  source: /note="Description of Artificial Sequence: Synthetic oligonucleotide"
agcauguuguucauaaucauuga

SEQ ID NO: 1386 - RNA, 21 nt, Artificial Sequence
  source: /note="Description of Artificial Sequence: Synthetic oligonucleotide"
aauuccccacuucaauacaaa

SEQ ID NO: 1387 - RNA, 23 nt, Artificial Sequence
  source: /note="Description of Artificial Sequence: Synthetic oligonucleotide"
uuuguauugaaguggggaauuac

SEQ ID NO: 1388 - RNA, 21 nt, Artificial Sequence
  source: /note="Description of Artificial Sequence: Synthetic oligonucleotide"
auuccccacuucaauacaaag

SEQ ID NO: 1389 - RNA, 23 nt, Artificial Sequence
  source: /note="Description of Artificial Sequence: Synthetic oligonucleotide"
cuuuguauugaaguggggaauua

SEQ ID NO: 1390 - RNA, 21 nt, Artificial Sequence
  source: /note="Description of Artificial Sequence: Synthetic oligonucleotide"
cuguaauuccccacuucaaua

SEQ ID NO: 1391 - RNA, 23 nt, Artificial Sequence
  source: /note="Description of Artificial Sequence: Synthetic oligonucleotide"
uauugaaguggggaauuacagac

SEQ ID NO: 1392 - RNA, 21 nt, Artificial Sequence
  source: /note="Description of Artificial Sequence: Synthetic oligonucleotide"
ucuguaauuccccacuucaau

SEQ ID NO: 1393 - RNA, 23 nt, Artificial Sequence
  source: /note="Description of Artificial Sequence: Synthetic oligonucleotide"
auugaaguggggaauuacagacu

SEQ ID NO: 1394 - RNA, 21 nt, Artificial Sequence
  source: /note="Description of Artificial Sequence: Synthetic oligonucleotide"
ugaugugcguaacagauucaa

SEQ ID NO: 1395 - RNA, 23 nt, Artificial Sequence
  source: /note="Description of Artificial Sequence: Synthetic oligonucleotide"
uugaaucuguuacgcacaucauc

SEQ ID NO: 1396 - RNA, 21 nt, Artificial Sequence
  source: /note="Description of Artificial Sequence: Synthetic oligonucleotide"
gaugugcguaacagauucaaa

SEQ ID NO: 1397 - RNA, 23 nt, Artificial Sequence
  source: /note="Description of Artificial Sequence: Synthetic oligonucleotide"
uuugaaucuguuacgcacaucau

SEQ ID NO: 1398 - RNA, 21 nt, Artificial Sequence
  source: /note="Description of Artificial Sequence: Synthetic oligonucleotide"
uggaugaugugcguaacagau

SEQ ID NO: 1399 - RNA, 23 nt, Artificial Sequence
  source: /note="Description of Artificial Sequence: Synthetic oligonucleotide"
aucuguuacgcacaucauccaga

SEQ ID NO: 1400 - RNA, 21 nt, Artificial Sequence
  source: /note="Description of Artificial Sequence: Synthetic oligonucleotide"
cuggaugaugugcguaacaga

SEQ ID NO: 1401 - RNA, 23 nt, Artificial Sequence
  source: /note="Description of Artificial Sequence: Synthetic oligonucleotide"
ucuguuacgcacaucauccagac

SEQ ID NO: 1402 - RNA, 21 nt, Artificial Sequence
  source: /note="Description of Artificial Sequence: Synthetic oligonucleotide"
gaauggguggcgguaauuggu

SEQ ID NO: 1403 - RNA, 23 nt, Artificial Sequence
  source: /note="Description of Artificial Sequence: Synthetic oligonucleotide"
accaauuaccgccacccauucca

SEQ ID NO: 1404 - RNA, 21 nt, Artificial Sequence
  source: /note="Description of Artificial Sequence: Synthetic oligonucleotide"
aauggguggcgguaauuggug

SEQ ID NO: 1405 - RNA, 23 nt, Artificial Sequence
  source: /note="Description of Artificial Sequence: Synthetic oligonucleotide"
caccaauuaccgccacccauucc

SEQ ID NO: 1406 - RNA, 21 nt, Artificial Sequence
  source: /note="Description of Artificial Sequence: Synthetic oligonucleotide"
auuggaauggguggcgguaau

SEQ ID NO: 1407 - RNA, 23 nt, Artificial Sequence
  source: /note="Description of Artificial Sequence: Synthetic oligonucleotide"
auuaccgccacccauuccaauuc

SEQ ID NO: 1408 - RNA, 21 nt, Artificial Sequence
  source: /note="Description of Artificial Sequence: Synthetic oligonucleotide"
aauuggaauggguggcgguaa

SEQ ID NO: 1409 - RNA, 23 nt, Artificial Sequence
  source: /note="Description of Artificial Sequence: Synthetic oligonucleotide"
uuaccgccacccauuccaauucu

SEQ ID NO: 1410 - RNA, 21 nt, Artificial Sequence
  source: /note="Description of Artificial Sequence: Synthetic oligonucleotide"
uccggaauguugcugaaacag

SEQ ID NO: 1411 - RNA, 23 nt, Artificial Sequence
  source: /note="Description of Artificial Sequence: Synthetic oligonucleotide"
cuguuucagcaacauuccggagc

SEQ ID NO: 1412 - RNA, 21 nt, Artificial Sequence
  source: /note="Description of Artificial Sequence: Synthetic oligonucleotide"
ccggaauguugcugaaacaga

SEQ ID NO: 1413 - RNA, 23 nt, Artificial Sequence
  source: /note="Description of Artificial Sequence: Synthetic oligonucleotide"
ucuguuucagcaacauuccggag

SEQ ID NO: 1414 - RNA, 21 nt, Artificial Sequence
  source: /note="Description of Artificial Sequence: Synthetic oligonucleotide"
augcuccggaauguugcugaa

SEQ ID NO: 1415 - RNA, 23 nt, Artificial Sequence
  source: /note="Description of Artificial Sequence: Synthetic oligonucleotide"
uucagcaacauuccggagcaucc

SEQ ID NO: 1416 - RNA, 21 nt, Artificial Sequence
  source: /note="Description of Artificial Sequence: Synthetic oligonucleotide"
gaugcuccggaauguugcuga

SEQ ID NO: 1417 - RNA, 23 nt, Artificial Sequence
  source: /note="Description of Artificial Sequence: Synthetic oligonucleotide"
ucagcaacauuccggagcauccu

SEQ ID NO: 1418 - RNA, 21 nt, Artificial Sequence
  source: /note="Description of Artificial Sequence: Synthetic oligonucleotide"
uguccucgagauacuaaagga

SEQ ID NO: 1419 - RNA, 23 nt, Artificial Sequence
  source: /note="Description of Artificial Sequence: Synthetic oligonucleotide"
uccuuuaguaucucgaggacauc

SEQ ID NO: 1420 - RNA, 21 nt, Artificial Sequence
  source: /note="Description of Artificial Sequence: Synthetic oligonucleotide"
guccucgagauacuaaaggaa

SEQ ID NO: 1421 - RNA, 23 nt, Artificial Sequence
  source: /note="Description of Artificial Sequence: Synthetic oligonucleotide"
uuccuuuaguaucucgaggacau

SEQ ID NO: 1422 - RNA, 21 nt, Artificial Sequence
  source: /note="Description of Artificial Sequence: Synthetic oligonucleotide"
aagauguccucgagauacuaa

SEQ ID NO: 1423 - RNA, 23 nt, Artificial Sequence
  source: /note="Description of Artificial Sequence: Synthetic oligonucleotide"
uuaguaucucgaggacaucuuga

SEQ ID NO: 1424 - RNA, 21 nt, Artificial Sequence
  source: /note="Description of Artificial Sequence: Synthetic oligonucleotide"
caagauguccucgagauacua

SEQ ID NO: 1425 - RNA, 23 nt, Artificial Sequence
  source: /note="Description of Artificial Sequence: Synthetic oligonucleotide"
uaguaucucgaggacaucuugaa

SEQ ID NO: 1426 - RNA, 21 nt, Artificial Sequence
  source: /note="Description of Artificial Sequence: Synthetic oligonucleotide"
acaacaugcuaaaucaguacu

SEQ ID NO: 1427 - RNA, 23 nt, Artificial Sequence
  source: /note="Description of Artificial Sequence: Synthetic oligonucleotide"
aguacugauuuagcauguuguuc

SEQ ID NO: 1428 - RNA, 21 nt, Artificial Sequence
  source: /note="Description of Artificial Sequence: Synthetic oligonucleotide"
caacaugcuaaaucaguacuu

SEQ ID NO: 1429 - RNA, 23 nt, Artificial Sequence
  source: /note="Description of Artificial Sequence: Synthetic oligonucleotide"
aaguacugauuuagcauguuguu

SEQ ID NO: 1430 - RNA, 21 nt, Artificial Sequence
  source: /note="Description of Artificial Sequence: Synthetic oligonucleotide"
augaacaacaugcuaaaucag

SEQ ID NO: 1431 - RNA, 23 nt, Artificial Sequence
  source: /note="Description of Artificial Sequence: Synthetic oligonucleotide"
cugauuuagcauguuguucauaa

SEQ ID NO: 1432 - RNA, 21 nt, Artificial Sequence
  source: /note="Description of Artificial Sequence: Synthetic oligonucleotide"
uaugaacaacaugcuaaauca

SEQ ID NO: 1433 - RNA, 23 nt, Artificial Sequence
  source: /note="Description of Artificial Sequence: Synthetic oligonucleotide"
ugauuuagcauguuguucauaau

SEQ ID NO: 1434 - RNA, 21 nt, Artificial Sequence
  source: /note="Description of Artificial Sequence: Synthetic oligonucleotide"
gccaaggcuguguuugugggg

SEQ ID NO: 1435 - RNA, 23 nt, Artificial Sequence
  source: /note="Description of Artificial Sequence: Synthetic oligonucleotide"
ccccacaaacacagccuuggcgc

SEQ ID NO: 1436 - RNA, 21 nt, Artificial Sequence
  source: /note="Description of Artificial Sequence: Synthetic oligonucleotide"
ccaaggcuguguuugugggga

SEQ ID NO: 1437 - RNA, 23 nt, Artificial Sequence
  source: /note="Description of Artificial Sequence: Synthetic oligonucleotide"
uccccacaaacacagccuuggcg

SEQ ID NO: 1438 - RNA, 21 nt, Artificial Sequence
  source: /note="Description of Artificial Sequence: Synthetic oligonucleotide"
uggcgccaaggcuguguuugu

SEQ ID NO: 1439 - RNA, 23 nt, Artificial Sequence
  source: /note="Description of Artificial Sequence: Synthetic oligonucleotide"
acaaacacagccuuggcgccaag

SEQ ID NO: 1440 - RNA, 21 nt, Artificial Sequence
  source: /note="Description of Artificial Sequence: Synthetic oligonucleotide"
uuggcgccaaggcuguguuug

SEQ ID NO: 1441 - RNA, 23 nt, Artificial Sequence
  source: /note="Description of Artificial Sequence: Synthetic oligonucleotide"
caaacacagccuuggcgccaaga

SEQ ID NO: 1442 - RNA, 21 nt, Artificial Sequence
  source: /note="Description of Artificial Sequence: Synthetic oligonucleotide"
ugaaagcucuggcucuuggcg

SEQ ID NO: 1443 - RNA, 23 nt, Artificial Sequence
  source: /note="Description of Artificial Sequence: Synthetic oligonucleotide"
cgccaagagccagagcuuucaga

SEQ ID NO: 1444 - RNA, 21 nt, Artificial Sequence
  source: /note="Description of Artificial Sequence: Synthetic oligonucleotide"
gaaagcucuggcucuuggcgc

SEQ ID NO: 1445 - RNA, 23 nt, Artificial Sequence
  source: /note="Description of Artificial Sequence: Synthetic oligonucleotide"
gcgccaagagccagagcuuucag

SEQ ID NO: 1446 - RNA, 21 nt, Artificial Sequence
  source: /note="Description of Artificial Sequence: Synthetic oligonucleotide"
guucugaaagcucuggcucuu

SEQ ID NO: 1447 - RNA, 23 nt, Artificial Sequence
  source: /note="Description of Artificial Sequence: Synthetic oligonucleotide"
aagagccagagcuuucagaacau

SEQ ID NO: 1448 - RNA, 21 nt, Artificial Sequence
  source: /note="Description of Artificial Sequence: Synthetic oligonucleotide"
uguucugaaagcucuggcucu

SEQ ID NO: 1449 - RNA, 23 nt, Artificial Sequence
  source: /note="Description of Artificial Sequence: Synthetic oligonucleotide"
agagccagagcuuucagaacauc

SEQ ID NO: 1450 - RNA, 21 nt, Artificial Sequence
  source: /note="Description of Artificial Sequence: Synthetic oligonucleotide"
cagccacuauugauguucugc

SEQ ID NO: 1451 - RNA, 23 nt, Artificial Sequence
  source: /note="Description of Artificial Sequence: Synthetic oligonucleotide"
gcagaacaucaauaguggcuggc

SEQ ID NO: 1452 - RNA, 21 nt, Artificial Sequence
  source: /note="Description of Artificial Sequence: Synthetic oligonucleotide"
agccacuauugauguucugcc

SEQ ID NO: 1453 - RNA, 23 nt, Artificial Sequence
  source: /note="Description of Artificial Sequence: Synthetic oligonucleotide"
ggcagaacaucaauaguggcugg

SEQ ID NO: 1454 - RNA, 21 nt, Artificial Sequence
  source: /note="Description of Artificial Sequence: Synthetic oligonucleotide"
gugccagccacuauugauguu

SEQ ID NO: 1455 - RNA, 23 nt, Artificial Sequence
  source: /note="Description of Artificial Sequence: Synthetic oligonucleotide"
aacaucaauaguggcuggcaccc

SEQ ID NO: 1456 - RNA, 21 nt, Artificial Sequence
  source: /note="Description of Artificial Sequence: Synthetic oligonucleotide"
ggugccagccacuauugaugu

SEQ ID NO: 1457 - RNA, 23 nt, Artificial Sequence
  source: /note="Description of Artificial Sequence: Synthetic oligonucleotide"
acaucaauaguggcuggcacccc

SEQ ID NO: 1458 - RNA, 21 nt, Artificial Sequence
  source: /note="Description of Artificial Sequence: Synthetic oligonucleotide"
acaaggaccgagaagucacca

SEQ ID NO: 1459 - RNA, 23 nt, Artificial Sequence
  source: /note="Description of Artificial Sequence: Synthetic oligonucleotide"
uggugacuucucgguccuuguag

SEQ ID NO: 1460 - RNA, 21 nt, Artificial Sequence
  source: /note="Description of Artificial Sequence: Synthetic oligonucleotide"
caaggaccgagaagucaccaa

SEQ ID NO: 1461 - RNA, 23 nt, Artificial Sequence
  source: /note="Description of Artificial Sequence: Synthetic oligonucleotide"
uuggugacuucucgguccuugua

SEQ ID NO: 1462 - RNA, 21 nt, Artificial Sequence
  source: /note="Description of Artificial Sequence: Synthetic oligonucleotide"
aucuacaaggaccgagaaguc

SEQ ID NO: 1463 - RNA, 23 nt, Artificial Sequence
  source: /note="Description of Artificial Sequence: Synthetic oligonucleotide"
gacuucucgguccuuguagauau

SEQ ID NO: 1464 - RNA, 21 nt, Artificial Sequence
  source: /note="Description of Artificial Sequence: Synthetic oligonucleotide"
uaucuacaaggaccgagaagu

SEQ ID NO: 1465 - RNA, 23 nt, Artificial Sequence
  source: /note="Description of Artificial Sequence: Synthetic oligonucleotide"
acuucucgguccuuguagauaua

SEQ ID NO: 1466 - RNA, 21 nt, Artificial Sequence
  source: /note="Description of Artificial Sequence: Synthetic oligonucleotide"
cagaaugugaaagucaucgac

SEQ ID NO: 1467 - RNA, 23 nt, Artificial Sequence
  source: /note="Description of Artificial Sequence: Synthetic oligonucleotide"
gucgaugacuuucacauucuggc

SEQ ID NO: 1468 - RNA, 21 nt, Artificial Sequence
  source: /note="Description of Artificial Sequence: Synthetic oligonucleotide"
agaaugugaaagucaucgaca

SEQ ID NO: 1469 - RNA, 23 nt, Artificial Sequence
  source: /note="Description of Artificial Sequence: Synthetic oligonucleotide"
ugucgaugacuuucacauucugg

SEQ ID NO: 1470 - RNA, 21 nt, Artificial Sequence
  source: /note="Description of Artificial Sequence: Synthetic oligonucleotide"
gugccagaaugugaaagucau

SEQ ID NO: 1471 - RNA, 23 nt, Artificial Sequence
  source: /note="Description of Artificial Sequence: Synthetic oligonucleotide"
augacuuucacauucuggcaccc

SEQ ID NO: 1472 - RNA, 21 nt, Artificial Sequence
  source: /note="Description of Artificial Sequence: Synthetic oligonucleotide"
ggugccagaaugugaaaguca

SEQ ID NO: 1473 - RNA, 23 nt, Artificial Sequence
  source: /note="Description of Artificial Sequence: Synthetic oligonucleotide"
ugacuuucacauucuggcaccca

SEQ ID NO: 1474 - RNA, 21 nt, Artificial Sequence
  source: /note="Description of Artificial Sequence: Synthetic oligonucleotide"
agauguccucgagauacuaaa

SEQ ID NO: 1475 - RNA, 23 nt, Artificial Sequence
  source: /note="Description of Artificial Sequence: Synthetic oligonucleotide"
uuuaguaucucgaggacaucuug

SEQ ID NO: 1476 - RNA, 21 nt, Artificial Sequence
  source: /note="Description of Artificial Sequence: Synthetic oligonucleotide"
gauguccucgagauacuaaag

SEQ ID NO: 1477 - RNA, 23 nt, Artificial Sequence
  source: /note="Description of Artificial Sequence: Synthetic oligonucleotide"
cuuuaguaucucgaggacaucuu

SEQ ID NO: 1478 - RNA, 21 nt, Artificial Sequence
  source: /note="Description of Artificial Sequence: Synthetic oligonucleotide"
uucaagauguccucgagauac

SEQ ID NO: 1479 - RNA, 23 nt, Artificial Sequence
  source: /note="Description of Artificial Sequence: Synthetic oligonucleotide"
guaucucgaggacaucuugaaca

SEQ ID NO: 1480 - RNA, 21 nt, Artificial Sequence
  source: /note="Description of Artificial Sequence: Synthetic oligonucleotide"
guucaagauguccucgagaua

SEQ ID NO: 1481 - RNA, 23 nt, Artificial Sequence
  source: /note="Description of Artificial Sequence: Synthetic oligonucleotide"
uaucucgaggacaucuugaacac

SEQ ID NO: 1482 - RNA, 21 nt, Artificial Sequence
  source: /note="Description of Artificial Sequence: Synthetic oligonucleotide"
guggacuugcugcauaugugg

SEQ ID NO: 1483 - RNA, 23 nt, Artificial Sequence
  source: /note="Description of Artificial Sequence: Synthetic oligonucleotide"
ccacauaugcagcaaguccacug

SEQ ID NO: 1484 - RNA, 21 nt, Artificial Sequence
  source: /note="Description of Artificial Sequence: Synthetic oligonucleotide"
uggacuugcugcauauguggc

SEQ ID NO: 1485 - RNA, 23 nt, Artificial Sequence
  source: /note="Description of Artificial Sequence: Synthetic oligonucleotide"
gccacauaugcagcaaguccacu

SEQ ID NO: 1486 - RNA, 21 nt, Artificial Sequence
  source: /note="Description of Artificial Sequence: Synthetic oligonucleotide"
gacaguggacuugcugcauau

SEQ ID NO: 1487 - RNA, 23 nt, Artificial Sequence
  source: /note="Description of Artificial Sequence: Synthetic oligonucleotide"
auaugcagcaaguccacugucgu

SEQ ID NO: 1488 - RNA, 21 nt, Artificial Sequence
  source: /note="Description of Artificial Sequence: Synthetic oligonucleotide"
cgacaguggacuugcugcaua

SEQ ID NO: 1489 - RNA, 23 nt, Artificial Sequence
  source: /note="Description of Artificial Sequence: Synthetic oligonucleotide"
uaugcagcaaguccacugucguc

SEQ ID NO: 1490 - RNA, 21 nt, Artificial Sequence
  source: /note="Description of Artificial Sequence: Synthetic oligonucleotide"
aaccaguacuuuaucauuuuc

SEQ ID NO: 1491 - RNA, 23 nt, Artificial Sequence
  source: /note="Description of Artificial Sequence: Synthetic oligonucleotide"
gaaaaugauaaaguacugguuuc

SEQ ID NO: 1492 - RNA, 21 nt, Artificial Sequence
  source: /note="Description of Artificial Sequence: Synthetic oligonucleotide"
accaguacuuuaucauuuucu

SEQ ID NO: 1493 - RNA, 23 nt, Artificial Sequence
  source: /note="Description of Artificial Sequence: Synthetic oligonucleotide"
agaaaaugauaaaguacugguuu

SEQ ID NO: 1494 - RNA, 21 nt, Artificial Sequence
  source: /note="Description of Artificial Sequence: Synthetic oligonucleotide"
uugaaaccaguacuuuaucau

SEQ ID NO: 1495 - RNA, 23 nt, Artificial Sequence
  source: /note="Description of Artificial Sequence: Synthetic oligonucleotide"
augauaaaguacugguuucaaaa

SEQ ID NO: 1496 - RNA, 21 nt, Artificial Sequence
  source: /note="Description of Artificial Sequence: Synthetic oligonucleotide"
uuugaaaccaguacuuuauca

SEQ ID NO: 1497 - RNA, 23 nt, Artificial Sequence
  source: /note="Description of Artificial Sequence: Synthetic oligonucleotide"
ugauaaaguacugguuucaaaau

SEQ ID NO: 1498 - RNA, 21 nt, Artificial Sequence
  source: /note="Description of Artificial Sequence: Synthetic oligonucleotide"
cgagaagucaccaagaagcua

SEQ ID NO: 1499 - RNA, 23 nt, Artificial Sequence
  source: /note="Description of Artificial Sequence: Synthetic oligonucleotide"
uagcuucuuggugacuucucggu

SEQ ID NO: 1500 - RNA, 21 nt, Artificial Sequence
  source: /note="Description of Artificial Sequence: Synthetic oligonucleotide"
gagaagucaccaagaagcuag

SEQ ID NO: 1501 - RNA, 23 nt, Artificial Sequence
  source: /note="Description of Artificial Sequence: Synthetic oligonucleotide"
cuagcuucuuggugacuucucgg

SEQ ID NO: 1502 - RNA, 21 nt, Artificial Sequence
  source: /note="Description of Artificial Sequence: Synthetic oligonucleotide"
ggaccgagaagucaccaagaa

SEQ ID NO: 1503 - RNA, 23 nt, Artificial Sequence
  source: /note="Description of Artificial Sequence: Synthetic oligonucleotide"
uucuuggugacuucucgguccuu

SEQ ID NO: 1504 - RNA, 21 nt, Artificial Sequence
  source: /note="Description of Artificial Sequence: Synthetic oligonucleotide"
aggaccgagaagucaccaaga

SEQ ID NO: 1505 - RNA, 23 nt, Artificial Sequence
  source: /note="Description of Artificial Sequence: Synthetic oligonucleotide"
ucuuggugacuucucgguccuug

SEQ ID NO: 1506 - RNA, 21 nt, Artificial Sequence
  source: /note="Description of Artificial Sequence: Synthetic oligonucleotide"
ucaaaguguugguaaugccug

SEQ ID NO: 1507 - RNA, 23 nt, Artificial Sequence
  source: /note="Description of Artificial Sequence: Synthetic oligonucleotide"
caggcauuaccaacacuuugaac

SEQ ID NO: 1508 - RNA, 21 nt, Artificial Sequence
  source: /note="Description of Artificial Sequence: Synthetic oligonucleotide"
caaaguguugguaaugccuga

SEQ ID NO: 1509 - RNA, 23 nt, Artificial Sequence
  source: /note="Description of Artificial Sequence: Synthetic oligonucleotide"
ucaggcauuaccaacacuuugaa

SEQ ID NO: 1510 - RNA, 21 nt, Artificial Sequence
  source: /note="Description of Artificial Sequence: Synthetic oligonucleotide"
agguucaaaguguugguaaug

SEQ ID NO: 1511 - RNA, 23 nt, Artificial Sequence
  source: /note="Description of Artificial Sequence: Synthetic oligonucleotide"
cauuaccaacacuuugaaccuga

SEQ ID NO: 1512 - RNA, 21 nt, Artificial Sequence
  source: /note="Description of Artificial Sequence: Synthetic oligonucleotide"
cagguucaaaguguugguaau

SEQ ID NO: 1513 - RNA, 23 nt, Artificial Sequence
  source: /note="Description of Artificial Sequence: Synthetic oligonucleotide"
auuaccaacacuuugaaccugag

SEQ ID NO: 1514 - RNA, 21 nt, Artificial Sequence
  source: /note="Description of Artificial Sequence: Synthetic oligonucleotide"
uauuacuugacaaagagacac

SEQ ID NO: 1515 - RNA, 23 nt, Artificial Sequence
  source: /note="Description of Artificial Sequence: Synthetic oligonucleotide"
gugucucuuugucaaguaauaca

SEQ ID NO: 1516 - RNA, 21 nt, Artificial Sequence
  source: /note="Description of Artificial Sequence: Synthetic oligonucleotide"
auuacuugacaaagagacacu

SEQ ID NO: 1517 - RNA, 23 nt, Artificial Sequence
  source: /note="Description of Artificial Sequence: Synthetic oligonucleotide"
agugucucuuugucaaguaauac

SEQ ID NO: 1518 - RNA, 21 nt, Artificial Sequence
  source: /note="Description of Artificial Sequence: Synthetic oligonucleotide"
cauguauuacuugacaaagag

SEQ ID NO: 1519 - RNA, 23 nt, Artificial Sequence
  source: /note="Description of Artificial Sequence: Synthetic oligonucleotide"
cucuuugucaaguaauacaugcu

SEQ ID NO: 1520 - RNA, 21 nt, Artificial Sequence
  source: /note="Description of Artificial Sequence: Synthetic oligonucleotide"
gcauguauuacuugacaaaga

SEQ ID NO: 1521 - RNA, 23 nt, Artificial Sequence
  source: /note="Description of Artificial Sequence: Synthetic oligonucleotide"
ucuuugucaaguaauacaugcug

SEQ ID NO: 1522 - RNA, 21 nt, Artificial Sequence
  source: /note="Description of Artificial Sequence: Synthetic oligonucleotide"
aaagucaucgacaagacauug

SEQ ID NO: 1523 - RNA, 23 nt, Artificial Sequence
  source: /note="Description of Artificial Sequence: Synthetic oligonucleotide"
caaugucuugucgaugacuuuca

SEQ ID NO: 1524 - RNA, 21 nt, Artificial Sequence
  source: /note="Description of Artificial Sequence: Synthetic oligonucleotide"
aagucaucgacaagacauugg

SEQ ID NO: 1525 - RNA, 23 nt, Artificial Sequence
  source: /note="Description of Artificial Sequence: Synthetic oligonucleotide"
ccaaugucuugucgaugacuuuc

SEQ ID NO: 1526 - RNA, 21 nt, Artificial Sequence
  source: /note="Description of Artificial Sequence: Synthetic oligonucleotide"
ugugaaagucaucgacaagac

SEQ ID NO: 1527 - RNA, 23 nt, Artificial Sequence
  source: /note="Description of Artificial Sequence: Synthetic oligonucleotide"
gucuugucgaugacuuucacauu

SEQ ID NO: 1528 - RNA, 21 nt, Artificial Sequence
  source: /note="Description of Artificial Sequence: Synthetic oligonucleotide"
augugaaagucaucgacaaga

SEQ ID NO: 1529 - RNA, 23 nt, Artificial Sequence
  source: /note="Description of Artificial Sequence: Synthetic oligonucleotide"
ucuugucgaugacuuucacauuc

SEQ ID NO: 1530 - RNA, 21 nt, Artificial Sequence
  source: /note="Description of Artificial Sequence: Synthetic oligonucleotide"
auauguggcuaaagcaauaga

SEQ ID NO: 1531 - RNA, 23 nt, Artificial Sequence
  source: /note="Description of Artificial Sequence: Synthetic oligonucleotide"
ucuauugcuuuagccacauaugc

SEQ ID NO: 1532 - RNA, 21 nt, Artificial Sequence
  source: /note="Description of Artificial Sequence: Synthetic oligonucleotide"
uauguggcuaaagcaauagac

SEQ ID NO: 1533 - RNA, 23 nt, Artificial Sequence
  source: /note="Description of Artificial Sequence: Synthetic oligonucleotide"
gucuauugcuuuagccacauaug

SEQ ID NO: 1534 - RNA, 21 nt, Artificial Sequence
  source: /note="Description of Artificial Sequence: Synthetic oligonucleotide"
cugcauauguggcuaaagcaa

SEQ ID NO: 1535 - RNA, 23 nt, Artificial Sequence
  source: /note="Description of Artificial Sequence: Synthetic oligonucleotide"
uugcuuuagccacauaugcagca

SEQ ID NO: 1536 - RNA, 21 nt, Artificial Sequence
  source: /note="Description of Artificial Sequence: Synthetic oligonucleotide"
gcugcauauguggcuaaagca

SEQ ID NO: 1537 - RNA, 23 nt, Artificial Sequence
  source: /note="Description of Artificial Sequence: Synthetic oligonucleotide"
ugcuuuagccacauaugcagcaa

SEQ ID NO: 1538 - RNA, 21 nt, Artificial Sequence
  source: /note="Description of Artificial Sequence: Synthetic oligonucleotide"
agacgacaguggacuugcugc

SEQ ID NO: 1539 - RNA, 23 nt, Artificial Sequence
  source: /note="Description of Artificial Sequence: Synthetic oligonucleotide"
gcagcaaguccacugucgucucc

SEQ ID NO: 1540 - RNA, 21 nt, Artificial Sequence
  source: /note="Description of Artificial Sequence: Synthetic oligonucleotide"
gacgacaguggacuugcugca

SEQ ID NO: 1541 - RNA, 23 nt, Artificial Sequence
  source: /note="Description of Artificial Sequence: Synthetic oligonucleotide"
ugcagcaaguccacugucgucuc

SEQ ID NO: 1542 - RNA, 21 nt, Artificial Sequence
  source: /note="Description of Artificial Sequence: Synthetic oligonucleotide"
uuggagacgacaguggacuug

SEQ ID NO: 1543 - RNA, 23 nt, Artificial Sequence
  source: /note="Description of Artificial Sequence: Synthetic oligonucleotide"
caaguccacugucgucuccaaaa

SEQ ID NO: 1544 - RNA, 21 nt, Artificial Sequence
  source: /note="Description of Artificial Sequence: Synthetic oligonucleotide"
uuuggagacgacaguggacuu

SEQ ID NO: 1545 - RNA, 23 nt, Artificial Sequence
  source: /note="Description of Artificial Sequence: Synthetic oligonucleotide"
aaguccacugucgucuccaaaau

SEQ ID NO: 1546 - RNA, 21 nt, Artificial Sequence
  source: /note="Description of Artificial Sequence: Synthetic oligonucleotide"
ggccaccuccucaauugaaga

SEQ ID NO: 1547 - RNA, 23 nt, Artificial Sequence
  source: /note="Description of Artificial Sequence: Synthetic oligonucleotide"
ucuucaauugaggagguggccca

SEQ ID NO: 1548 - RNA, 21 nt, Artificial Sequence
  source: /note="Description of Artificial Sequence: Synthetic oligonucleotide"
gccaccuccucaauugaagaa

SEQ ID NO: 1549 - RNA, 23 nt, Artificial Sequence
  source: /note="Description of Artificial Sequence: Synthetic oligonucleotide"
uucuucaauugaggagguggccc

SEQ ID NO: 1550 - RNA, 21 nt, Artificial Sequence
  source: /note="Description of Artificial Sequence: Synthetic oligonucleotide"
ccugggccaccuccucaauug

SEQ ID NO: 1551 - RNA, 23 nt, Artificial Sequence
  source: /note="Description of Artificial Sequence: Synthetic oligonucleotide"
caauugaggagguggcccaggaa

SEQ ID NO: 1552 - RNA, 21 nt, Artificial Sequence
  source: /note="Description of Artificial Sequence: Synthetic oligonucleotide"
uccugggccaccuccucaauu

SEQ ID NO: 1553 - RNA, 23 nt, Artificial Sequence
  source: /note="Description of Artificial Sequence: Synthetic oligonucleotide"
aauugaggagguggcccaggaac

SEQ ID NO: 1554 - RNA, 21 nt, Artificial Sequence
  source: /note="Description of Artificial Sequence: Synthetic oligonucleotide"
uguauguuacuucuuagagag

SEQ ID NO: 1555 - RNA, 23 nt, Artificial Sequence
  source: /note="Description of Artificial Sequence: Synthetic oligonucleotide"
cucucuaagaaguaacauacauc

SEQ ID NO: 1556 - RNA, 21 nt, Artificial Sequence
  source: /note="Description of Artificial Sequence: Synthetic oligonucleotide"
guauguuacuucuuagagaga

SEQ ID NO: 1557 - RNA, 23 nt, Artificial Sequence
  source: /note="Description of Artificial Sequence: Synthetic oligonucleotide"
ucucucuaagaaguaacauacau

SEQ ID NO: 1558 - RNA, 21 nt, Artificial Sequence
  source: /note="Description of Artificial Sequence: Synthetic oligonucleotide"
aggauguauguuacuucuuag

SEQ ID NO: 1559 - RNA, 23 nt, Artificial Sequence
  source: /note="Description of Artificial Sequence: Synthetic oligonucleotide"
cuaagaaguaacauacauccuaa

SEQ ID NO: 1560 - RNA, 21 nt, Artificial Sequence
  source: /note="Description of Artificial Sequence: Synthetic oligonucleotide"
uaggauguauguuacuucuua

SEQ ID NO: 1561 - RNA, 23 nt, Artificial Sequence
  source: /note="Description of Artificial Sequence: Synthetic oligonucleotide"
uaagaaguaacauacauccuaaa

SEQ ID NO: 1562 - RNA, 21 nt, Artificial Sequence
  source: /note="Description of Artificial Sequence: Synthetic oligonucleotide"
aaauguuuuaggauguauguu

SEQ ID NO: 1563 - RNA, 23 nt, Artificial Sequence
  source: /note="Description of Artificial Sequence: Synthetic oligonucleotide"
aacauacauccuaaaacauuugg

SEQ ID NO: 1564 - RNA, 21 nt, Artificial Sequence
  source: /note="Description of Artificial Sequence: Synthetic oligonucleotide"
aauguuuuaggauguauguua

SEQ ID NO: 1565 - RNA, 23 nt, Artificial Sequence
  source: /note="Description of Artificial Sequence: Synthetic oligonucleotide"
uaacauacauccuaaaacauuug

SEQ ID NO: 1566 - RNA, 21 nt, Artificial Sequence
  source: /note="Description of Artificial Sequence: Synthetic oligonucleotide"
auccaaauguuuuaggaugua

SEQ ID NO: 1567 - RNA, 23 nt, Artificial Sequence
  source: /note="Description of Artificial Sequence: Synthetic oligonucleotide"
uacauccuaaaacauuuggauau

SEQ ID NO: 1568 - RNA, 21 nt, Artificial Sequence
  source: /note="Description of Artificial Sequence: Synthetic oligonucleotide"
uauccaaauguuuuaggaugu

SEQ ID NO: 1569 - RNA, 23 nt, Artificial Sequence
  source: /note="Description of Artificial Sequence: Synthetic oligonucleotide"
acauccuaaaacauuuggauaua

SEQ ID NO: 1570 - RNA, 21 nt, Artificial Sequence
  source: /note="Description of Artificial Sequence: Synthetic oligonucleotide"
auggguggcgguaauugguga

SEQ ID NO: 1571 - RNA, 23 nt, Artificial Sequence
  source: /note="Description of Artificial Sequence: Synthetic oligonucleotide"
ucaccaauuaccgccacccauuc

SEQ ID NO: 1572 - RNA, 21 nt, Artificial Sequence
  source: /note="Description of Artificial Sequence: Synthetic oligonucleotide"
uggguggcgguaauuggugau

SEQ ID NO: 1573 - RNA, 23 nt, Artificial Sequence
  source: /note="Description of Artificial Sequence: Synthetic oligonucleotide"
aucaccaauuaccgccacccauu

SEQ ID NO: 1574 - RNA, 21 nt, Artificial Sequence
  source: /note="Description of Artificial Sequence: Synthetic oligonucleotide"
uggaauggguggcgguaauug

SEQ ID NO: 1575 - RNA, 23 nt, Artificial Sequence
  source: /note="Description of Artificial Sequence: Synthetic oligonucleotide"
caauuaccgccacccauuccaau

SEQ ID NO: 1576 - RNA, 21 nt, Artificial Sequence
  source: /note="Description of Artificial Sequence: Synthetic oligonucleotide"
uuggaauggguggcgguaauu

SEQ ID NO: 1577 - RNA, 23 nt, Artificial Sequence
  source: /note="Description of Artificial Sequence: Synthetic oligonucleotide"
aauuaccgccacccauuccaauu

SEQ ID NO: 1578 - RNA, 21 nt, Artificial Sequence
  source: /note="Description of Artificial Sequence: Synthetic oligonucleotide"
uucaaaguguugguaaugccu

SEQ ID NO: 1579 - RNA, 23 nt, Artificial Sequence
  source: /note="Description of Artificial Sequence: Synthetic oligonucleotide"
aggcauuaccaacacuuugaacc

SEQ ID NO: 1580 - RNA, 21 nt, Artificial Sequence
  source: /note="Description of Artificial Sequence: Synthetic oligonucleotide"
ucaaaguguugguaaugccug

SEQ ID NO: 1581 - RNA, 23 nt, Artificial Sequence
  source: /note="Description of Artificial Sequence: Synthetic oligonucleotide"
caggcauuaccaacacuuugaac

SEQ ID NO: 1582 - RNA, 21 nt, Artificial Sequence
  source: /note="Description of Artificial Sequence: Synthetic oligonucleotide"
cagguucaaaguguugguaau

SEQ ID NO: 1583 - RNA, 23 nt, Artificial Sequence
  source: /note="Description of Artificial Sequence: Synthetic oligonucleotide"
auuaccaacacuuugaaccugag

SEQ ID NO: 1584 - RNA, 21 nt, Artificial Sequence
  source: /note="Description of Artificial Sequence: Synthetic oligonucleotide"
ucagguucaaaguguugguaa

SEQ ID NO: 1585 - RNA, 23 nt, Artificial Sequence
  source: /note="Description of Artificial Sequence: Synthetic oligonucleotide"
uuaccaacacuuugaaccugagc

SEQ ID NO: 1586 - RNA, 21 nt, Artificial Sequence
  source: /note="Description of Artificial Sequence: Synthetic oligonucleotide"
ccaccuccucaauugaagaag

SEQ ID NO: 1587 - RNA, 23 nt, Artificial Sequence
  source: /note="Description of Artificial Sequence: Synthetic oligonucleotide"
cuucuucaauugaggagguggcc

SEQ ID NO: 1588 - RNA, 21 nt, Artificial Sequence
  source: /note="Description of Artificial Sequence: Synthetic oligonucleotide"
caccuccucaauugaagaagu

SEQ ID NO: 1589 - RNA, 23 nt, Artificial Sequence
  source: /note="Description of Artificial Sequence: Synthetic oligonucleotide"
acuucuucaauugaggagguggc

SEQ ID NO: 1590 - RNA, 21 nt, Artificial Sequence
  source: /note="Description of Artificial Sequence: Synthetic oligonucleotide"
ugggccaccuccucaauugaa

SEQ ID NO: 1591 - RNA, 23 nt, Artificial Sequence
  source: /note="Description of Artificial Sequence: Synthetic oligonucleotide"
uucaauugaggagguggcccagg

SEQ ID NO: 1592 - RNA, 21 nt, Artificial Sequence
  source: /note="Description of Artificial Sequence: Synthetic oligonucleotide"
cugggccaccuccucaauuga

SEQ ID NO: 1593 - RNA, 23 nt, Artificial Sequence
  source: /note="Description of Artificial Sequence: Synthetic oligonucleotide"
ucaauugaggagguggcccagga

SEQ ID NO: 1594 - RNA, 21 nt, Artificial Sequence
  source: /note="Description of Artificial Sequence: Synthetic oligonucleotide"
gagugggugccagaaugugaa

SEQ ID NO: 1595 - RNA, 23 nt, Artificial Sequence
  source: /note="Description of Artificial Sequence: Synthetic oligonucleotide"
uucacauucuggcacccacucag

SEQ ID NO: 1596 - RNA, 21 nt, Artificial Sequence
  source: /note="Description of Artificial Sequence: Synthetic oligonucleotide"
agugggugccagaaugugaaa

SEQ ID NO: 1597 - RNA, 23 nt, Artificial Sequence
  source: /note="Description of Artificial Sequence: Synthetic oligonucleotide"
uuucacauucuggcacccacuca

SEQ ID NO: 1598 - RNA, 21 nt, Artificial Sequence
  source: /note="Description of Artificial Sequence: Synthetic oligonucleotide"
cucugagugggugccagaaug

SEQ ID NO: 1599 - RNA, 23 nt, Artificial Sequence
  source: /note="Description of Artificial Sequence: Synthetic oligonucleotide"
cauucuggcacccacucagagcc

SEQ ID NO: 1600 - RNA, 21 nt, Artificial Sequence
  source: /note="Description of Artificial Sequence: Synthetic oligonucleotide"
gcucugagugggugccagaau

SEQ ID NO: 1601 - RNA, 23 nt, Artificial Sequence
  source: /note="Description of Artificial Sequence: Synthetic oligonucleotide"
auucuggcacccacucagagcca

SEQ ID NO: 1602 - RNA, 21 nt, Artificial Sequence
  source: /note="Description of Artificial Sequence: Synthetic oligonucleotide"
gcacugauguucugaaagcuc

SEQ ID NO: 1603 - RNA, 23 nt, Artificial Sequence
  source: /note="Description of Artificial Sequence: Synthetic oligonucleotide"
gagcuuucagaacaucagugccu

SEQ ID NO: 1604 - RNA, 21 nt, Artificial Sequence
  source: /note="Description of Artificial Sequence: Synthetic oligonucleotide"
cacugauguucugaaagcucu

SEQ ID NO: 1605 - RNA, 23 nt, Artificial Sequence
  source: /note="Description of Artificial Sequence: Synthetic oligonucleotide"
agagcuuucagaacaucagugcc

SEQ ID NO: 1606 - RNA, 21 nt, Artificial Sequence
  source: /note="Description of Artificial Sequence: Synthetic oligonucleotide"
aaaggcacugauguucugaaa

SEQ ID NO: 1607 - RNA, 23 nt, Artificial Sequence
  source: /note="Description of Artificial Sequence: Synthetic oligonucleotide"
uuucagaacaucagugccuuucc

SEQ ID NO: 1608 - RNA, 21 nt, Artificial Sequence
  source: /note="Description of Artificial Sequence: Synthetic oligonucleotide"
gaaaggcacugauguucugaa

SEQ ID NO: 1609 - RNA, 23 nt, Artificial Sequence
  source: /note="Description of Artificial Sequence: Synthetic oligonucleotide"
uucagaacaucagugccuuuccg

SEQ ID NO: 1610 - RNA, 21 nt, Artificial Sequence
  source: /note="Description of Artificial Sequence: Synthetic oligonucleotide"
gggaagguggaagucuuccug

SEQ ID NO: 1611 - RNA, 23 nt, Artificial Sequence
  source: /note="Description of Artificial Sequence: Synthetic oligonucleotide"
caggaagacuuccaccuucccuu

SEQ ID NO: 1612 - RNA, 21 nt, Artificial Sequence
  source: /note="Description of Artificial Sequence: Synthetic oligonucleotide"
ggaagguggaagucuuccugg

SEQ ID NO: 1613 - RNA, 23 nt, Artificial Sequence
  source: /note="Description of Artificial Sequence: Synthetic oligonucleotide"
ccaggaagacuuccaccuucccu

SEQ ID NO: 1614 - RNA, 21 nt, Artificial Sequence
  source: /note="Description of Artificial Sequence: Synthetic oligonucleotide"
ggaagggaagguggaagucuu

SEQ ID NO: 1615 - RNA, 23 nt, Artificial Sequence
  source: /note="Description of Artificial Sequence: Synthetic oligonucleotide"
aagacuuccaccuucccuuccac

SEQ ID NO: 1616 - RNA, 21 nt, Artificial Sequence
  source: /note="Description of Artificial Sequence: Synthetic oligonucleotide"
uggaagggaagguggaagucu

SEQ ID NO: 1617 - RNA, 23 nt, Artificial Sequence
  source: /note="Description of Artificial Sequence: Synthetic oligonucleotide"
agacuuccaccuucccuuccaca

SEQ ID NO: 1618 - RNA, 21 nt, Artificial Sequence
  source: /note="Description of Artificial Sequence: Synthetic oligonucleotide"
ugcuaaaucaguacuuccaaa

SEQ ID NO: 1619 - RNA, 23 nt, Artificial Sequence
  source: /note="Description of Artificial Sequence: Synthetic oligonucleotide"
uuuggaaguacugauuuagcaug

SEQ ID NO: 1620 - RNA, 21 nt, Artificial Sequence
  source: /note="Description of Artificial Sequence: Synthetic oligonucleotide"
gcuaaaucaguacuuccaaag

SEQ ID NO: 1621 - RNA, 23 nt, Artificial Sequence
  source: /note="Description of Artificial Sequence: Synthetic oligonucleotide"
cuuuggaaguacugauuuagcau

SEQ ID NO: 1622 - RNA, 21 nt, Artificial Sequence
  source: /note="Description of Artificial Sequence: Synthetic oligonucleotide"
aacaugcuaaaucaguacuuc

SEQ ID NO: 1623 - RNA, 23 nt, Artificial Sequence
  source: /note="Description of Artificial Sequence: Synthetic oligonucleotide"
gaaguacugauuuagcauguugu

SEQ ID NO: 1624 - RNA, 21 nt, Artificial Sequence
  source: /note="Description of Artificial Sequence: Synthetic oligonucleotide"
caacaugcuaaaucaguacuu

SEQ ID NO: 1625 - RNA, 23 nt, Artificial Sequence
  source: /note="Description of Artificial Sequence: Synthetic oligonucleotide"
aaguacugauuuagcauguuguu

SEQ ID NO: 1626 - RNA, 21 nt, Artificial Sequence
  source: /note="Description of Artificial Sequence: Synthetic oligonucleotide"
ccacaacucaggaugaaaaau

SEQ ID NO: 1627 - RNA, 23 nt, Artificial Sequence
  source: /note="Description of Artificial Sequence: Synthetic oligonucleotide"
auuuuucauccugaguuguggcg

SEQ ID NO: 1628 - RNA, 21 nt, Artificial Sequence
  source: /note="Description of Artificial Sequence: Synthetic oligonucleotide"
cacaacucaggaugaaaaauu

SEQ ID NO: 1629 - RNA, 23 nt, Artificial Sequence
  source: /note="Description of Artificial Sequence: Synthetic oligonucleotide"
aauuuuucauccugaguuguggc

SEQ ID NO: 1630 - RNA, 21 nt, Artificial Sequence
  source: /note="Description of Artificial Sequence: Synthetic oligonucleotide"
gccgccacaacucaggaugaa

SEQ ID NO: 1631 - RNA, 23 nt, Artificial Sequence
  source: /note="Description of Artificial Sequence: Synthetic oligonucleotide"
uucauccugaguuguggcggcag

SEQ ID NO: 1632 - RNA, 21 nt, Artificial Sequence
  source: /note="Description of Artificial Sequence: Synthetic oligonucleotide"
ugccgccacaacucaggauga

SEQ ID NO: 1633 - RNA, 23 nt, Artificial Sequence
  source: /note="Description of Artificial Sequence: Synthetic oligonucleotide"
ucauccugaguuguggcggcagu

SEQ ID NO: 1634 - RNA, 21 nt, Artificial Sequence
  source: /note="Description of Artificial Sequence: Synthetic oligonucleotide"
gcaaccgucuggaugaugugc

SEQ ID NO: 1635 - RNA, 23 nt, Artificial Sequence
  source: /note="Description of Artificial Sequence: Synthetic oligonucleotide"
gcacaucauccagacgguugccc

SEQ ID NO: 1636 - RNA, 21 nt, Artificial Sequence
  source: /note="Description of Artificial Sequence: Synthetic oligonucleotide"
caaccgucuggaugaugugcg

SEQ ID NO: 1637 - RNA, 23 nt, Artificial Sequence
  source: /note="Description of Artificial Sequence: Synthetic oligonucleotide"
cgcacaucauccagacgguugcc

SEQ ID NO: 1638 - RNA, 21 nt, Artificial Sequence
  source: /note="Description of Artificial Sequence: Synthetic oligonucleotide"
cugggcaaccgucuggaugau

SEQ ID NO: 1639 - RNA, 23 nt, Artificial Sequence
  source: /note="Description of Artificial Sequence: Synthetic oligonucleotide"
aucauccagacgguugcccaggu

SEQ ID NO: 1640 - RNA, 21 nt, Artificial Sequence
  source: /note="Description of Artificial Sequence: Synthetic oligonucleotide"
ccugggcaaccgucuggauga

SEQ ID NO: 1641 - RNA, 23 nt, Artificial Sequence
  source: /note="Description of Artificial Sequence: Synthetic oligonucleotide"
ucauccagacgguugcccaggua

SEQ ID NO: 1642 - RNA, 21 nt, Artificial Sequence
  source: /note="Description of Artificial Sequence: Synthetic oligonucleotide"
gcaaaugaugaagaaacuuug

SEQ ID NO: 1643 - RNA, 23 nt, Artificial Sequence
  source: /note="Description of Artificial Sequence: Synthetic oligonucleotide"
caaaguuucuucaucauuugccc

SEQ ID NO: 1644 - RNA, 21 nt, Artificial Sequence
  source: /note="Description of Artificial Sequence: Synthetic oligonucleotide"
caaaugaugaagaaacuuugg

SEQ ID NO: 1645 - RNA, 23 nt, Artificial Sequence
  source: /note="Description of Artificial Sequence: Synthetic oligonucleotide"
ccaaaguuucuucaucauuugcc

SEQ ID NO: 1646 - RNA, 21 nt, Artificial Sequence
  source: /note="Description of Artificial Sequence: Synthetic oligonucleotide"
uggggcaaaugaugaagaaac

SEQ ID NO: 1647 - RNA, 23 nt, Artificial Sequence
  source: /note="Description of Artificial Sequence: Synthetic oligonucleotide"
guuucuucaucauuugccccaga

SEQ ID NO: 1648 - RNA, 21 nt, Artificial Sequence
  source: /note="Description of Artificial Sequence: Synthetic oligonucleotide"
cuggggcaaaugaugaagaaa

SEQ ID NO: 1649 - RNA, 23 nt, Artificial Sequence
  source: /note="Description of Artificial Sequence: Synthetic oligonucleotide"
uuucuucaucauuugccccagac

SEQ ID NO: 1650 - RNA, 21 nt, Artificial Sequence
  source: /note="Description of Artificial Sequence: Synthetic oligonucleotide"
ccaaggcuguguuugugggga

SEQ ID NO: 1651 - RNA, 23 nt, Artificial Sequence
  source: /note="Description of Artificial Sequence: Synthetic oligonucleotide"
uccccacaaacacagccuuggcg

SEQ ID NO: 1652 - RNA, 21 nt, Artificial Sequence
  source: /note="Description of Artificial Sequence: Synthetic oligonucleotide"
caaggcuguguuuguggggag

SEQ ID NO: 1653 - RNA, 23 nt, Artificial Sequence
  source: /note="Description of Artificial Sequence: Synthetic oligonucleotide"
cuccccacaaacacagccuuggc

SEQ ID NO: 1654 - RNA, 21 nt, Artificial Sequence
  source: /note="Description of Artificial Sequence: Synthetic oligonucleotide"
ggcgccaaggcuguguuugug

SEQ ID NO: 1655 - RNA, 23 nt, Artificial Sequence
  source: /note="Description of Artificial Sequence: Synthetic oligonucleotide"
cacaaacacagccuuggcgccaa

SEQ ID NO: 1656 - RNA, 21 nt, Artificial Sequence
  source: /note="Description of Artificial Sequence: Synthetic oligonucleotide"
uggcgccaaggcuguguuugu

SEQ ID NO: 1657 - RNA, 23 nt, Artificial Sequence
  source: /note="Description of Artificial Sequence: Synthetic oligonucleotide"
acaaacacagccuuggcgccaag

SEQ ID NO: 1658 - RNA, 21 nt, Artificial Sequence
  source: /note="Description of Artificial Sequence: Synthetic oligonucleotide"
acugccgccacaacucaggau

SEQ ID NO: 1659 - RNA, 23 nt, Artificial Sequence
  source: /note="Description of Artificial Sequence: Synthetic oligonucleotide"
auccugaguuguggcggcaguuu

SEQ ID NO: 1660 - RNA, 21 nt, Artificial Sequence
  source: /note="Description of Artificial Sequence: Synthetic oligonucleotide"
cugccgccacaacucaggaug

SEQ ID NO: 1661 - RNA, 23 nt, Artificial Sequence
  source: /note="Description of Artificial Sequence: Synthetic oligonucleotide"
cauccugaguuguggcggcaguu

SEQ ID NO: 1662 - RNA, 21 nt, Artificial Sequence
  source: /note="Description of Artificial Sequence: Synthetic oligonucleotide"
ucaaacugccgccacaacuca

SEQ ID NO: 1663 - RNA, 23 nt, Artificial Sequence
  source: /note="Description of Artificial Sequence: Synthetic oligonucleotide"
ugaguuguggcggcaguuugaau

SEQ ID NO: 1664 - RNA, 21 nt, Artificial Sequence
  source: /note="Description of Artificial Sequence: Synthetic oligonucleotide"
uucaaacugccgccacaacuc

SEQ ID NO: 1665 - RNA, 23 nt, Artificial Sequence
  source: /note="Description of Artificial Sequence: Synthetic oligonucleotide"
gaguuguggcggcaguuugaauc

SEQ ID NO: 1666 - RNA, 21 nt, Artificial Sequence
  source: /note="Description of Artificial Sequence: Synthetic oligonucleotide"
gggaagauaucaaauggcuga

SEQ ID NO: 1667 - RNA, 23 nt, Artificial Sequence
  source: /note="Description of Artificial Sequence: Synthetic oligonucleotide"
ucagccauuugauaucuucccag

SEQ ID NO: 1668 - RNA, 21 nt, Artificial Sequence
  source: /note="Description of Artificial Sequence: Synthetic oligonucleotide"
ggaagauaucaaauggcugag

SEQ ID NO: 1669 - RNA, 23 nt, Artificial Sequence
  source: /note="Description of Artificial Sequence: Synthetic oligonucleotide"
cucagccauuugauaucuuccca

SEQ ID NO: 1670 - RNA, 21 nt, Artificial Sequence
  source: /note="Description of Artificial Sequence: Synthetic oligonucleotide"
agcugggaagauaucaaaugg

SEQ ID NO: 1671 - RNA, 23 nt, Artificial Sequence
  source: /note="Description of Artificial Sequence: Synthetic oligonucleotide"
ccauuugauaucuucccagcuga

SEQ ID NO: 1672 - RNA, 21 nt, Artificial Sequence
  source: /note="Description of Artificial Sequence: Synthetic oligonucleotide"
cagcugggaagauaucaaaug

SEQ ID NO: 1673 - RNA, 23 nt, Artificial Sequence
  source: /note="Description of Artificial Sequence: Synthetic oligonucleotide"
cauuugauaucuucccagcugau

SEQ ID NO: 1674 - RNA, 21 nt, Artificial Sequence
  source: /note="Description of Artificial Sequence: Synthetic oligonucleotide"
aaucaguacuuccaaagucua

SEQ ID NO: 1675 - RNA, 23 nt, Artificial Sequence
  source: /note="Description of Artificial Sequence: Synthetic oligonucleotide"
uagacuuuggaaguacugauuua

SEQ ID NO: 1676 - RNA, 21 nt, Artificial Sequence
  source: /note="Description of Artificial Sequence: Synthetic oligonucleotide"
aucaguacuuccaaagucuau

SEQ ID NO: 1677 - RNA, 23 nt, Artificial Sequence
  source: /note="Description of Artificial Sequence: Synthetic oligonucleotide"
auagacuuuggaaguacugauuu

SEQ ID NO: 1678 - RNA, 21 nt, Artificial Sequence
  source: /note="Description of Artificial Sequence: Synthetic oligonucleotide"
gcuaaaucaguacuuccaaag

SEQ ID NO: 1679 - RNA, 23 nt, Artificial Sequence
  source: /note="Description of Artificial Sequence: Synthetic oligonucleotide"
cuuuggaaguacugauuuagcau

SEQ ID NO: 1680 - RNA, 21 nt, Artificial Sequence
  source: /note="Description of Artificial Sequence: Synthetic oligonucleotide"
ugcuaaaucaguacuuccaaa

SEQ ID NO: 1681 - RNA, 23 nt, Artificial Sequence
  source: /note="Description of Artificial Sequence: Synthetic oligonucleotide"
uuuggaaguacugauuuagcaug

SEQ ID NO: 1682 - RNA, 21 nt, Artificial Sequence
  source: /note="Description of Artificial Sequence: Synthetic oligonucleotide"
ucagcaugccaauaugugugg

SEQ ID NO: 1683 - RNA, 23 nt, Artificial Sequence
  source: /note="Description of Artificial Sequence: Synthetic oligonucleotide"
ccacacauauuggcaugcugacc

SEQ ID NO: 1684 - RNA, 21 nt, Artificial Sequence
  source: /note="Description of Artificial Sequence: Synthetic oligonucleotide"
cagcaugccaauauguguggg

SEQ ID NO: 1685 - RNA, 23 nt, Artificial Sequence
  source: /note="Description of Artificial Sequence: Synthetic oligonucleotide"
cccacacauauuggcaugcugac

SEQ ID NO: 1686 - RNA, 21 nt, Artificial Sequence
  source: /note="Description of Artificial Sequence: Synthetic oligonucleotide"
agggucagcaugccaauaugu

SEQ ID NO: 1687 - RNA, 23 nt, Artificial Sequence
  source: /note="Description of Artificial Sequence: Synthetic oligonucleotide"
acauauuggcaugcugacccucu

SEQ ID NO: 1688 - RNA, 21 nt, Artificial Sequence
  source: /note="Description of Artificial Sequence: Synthetic oligonucleotide"
gagggucagcaugccaauaug

SEQ ID NO: 1689 - RNA, 23 nt, Artificial Sequence
  source: /note="Description of Artificial Sequence: Synthetic oligonucleotide"
cauauuggcaugcugacccucug

SEQ ID NO: 1690 - RNA, 21 nt, Artificial Sequence
  source: /note="Description of Artificial Sequence: Synthetic oligonucleotide"
gcauauguggcuaaagcaaua

SEQ ID NO: 1691 - RNA, 23 nt, Artificial Sequence
  source: /note="Description of Artificial Sequence: Synthetic oligonucleotide"
uauugcuuuagccacauaugcag

SEQ ID NO: 1692 - RNA, 21 nt, Artificial Sequence
  source: /note="Description of Artificial Sequence: Synthetic oligonucleotide"
cauauguggcuaaagcaauag

SEQ ID NO: 1693 - RNA, 23 nt, Artificial Sequence
  source: /note="Description of Artificial Sequence: Synthetic oligonucleotide"
cuauugcuuuagccacauaugca

SEQ ID NO: 1694 - RNA, 21 nt, Artificial Sequence
  source: /note="Description of Artificial Sequence: Synthetic oligonucleotide"
ugcugcauauguggcuaaagc

SEQ ID NO: 1695 - RNA, 23 nt, Artificial Sequence
  source: /note="Description of Artificial Sequence: Synthetic oligonucleotide"
gcuuuagccacauaugcagcaag

SEQ ID NO: 1696 - RNA, 21 nt, Artificial Sequence
  source: /note="Description of Artificial Sequence: Synthetic oligonucleotide"
uugcugcauauguggcuaaag

SEQ ID NO: 1697 - RNA, 23 nt, Artificial Sequence
  source: /note="Description of Artificial Sequence: Synthetic oligonucleotide"
cuuuagccacauaugcagcaagu

SEQ ID NO: 1698 - RNA, 21 nt, Artificial Sequence
  source: /note="Description of Artificial Sequence: Synthetic oligonucleotide"
aaaugaugaagaaacuuuggc

SEQ ID NO: 1699 - RNA, 23 nt, Artificial Sequence
  source: /note="Description of Artificial Sequence: Synthetic oligonucleotide"
gccaaaguuucuucaucauuugc

SEQ ID NO: 1700 - RNA, 21 nt, Artificial Sequence
  source: /note="Description of Artificial Sequence: Synthetic oligonucleotide"
aaugaugaagaaacuuuggcu

SEQ ID NO: 1701 - RNA, 23 nt, Artificial Sequence
  source: /note="Description of Artificial Sequence: Synthetic oligonucleotide"
agccaaaguuucuucaucauuug

SEQ ID NO: 1702 - RNA, 21 nt, Artificial Sequence
  source: /note="Description of Artificial Sequence: Synthetic oligonucleotide"
gggcaaaugaugaagaaacuu

SEQ ID NO: 1703 - RNA, 23 nt, Artificial Sequence
  source: /note="Description of Artificial Sequence: Synthetic oligonucleotide"
aaguuucuucaucauuugcccca

SEQ ID NO: 1704 - RNA, 21 nt, Artificial Sequence
  source: /note="Description of Artificial Sequence: Synthetic oligonucleotide"
ggggcaaaugaugaagaaacu

SEQ ID NO: 1705 - RNA, 23 nt, Artificial Sequence
  source: /note="Description of Artificial Sequence: Synthetic oligonucleotide"
aguuucuucaucauuugccccag

SEQ ID NO: 1706 - RNA, 21 nt, Artificial Sequence
  source: /note="Description of Artificial Sequence: Synthetic oligonucleotide"
gagauacuaaaggaagaauuc

SEQ ID NO: 1707 - RNA, 23 nt, Artificial Sequence
  source: /note="Description of Artificial Sequence: Synthetic oligonucleotide"
gaauucuuccuuuaguaucucga

SEQ ID NO: 1708 - RNA, 21 nt, Artificial Sequence
  source: /note="Description of Artificial Sequence: Synthetic oligonucleotide"
agauacuaaaggaagaauucc

SEQ ID NO: 1709 - RNA, 23 nt, Artificial Sequence
  source: /note="Description of Artificial Sequence: Synthetic oligonucleotide"
ggaauucuuccuuuaguaucucg

SEQ ID NO: 1710 - RNA, 21 nt, Artificial Sequence
  source: /note="Description of Artificial Sequence: Synthetic oligonucleotide"
ccucgagauacuaaaggaaga

SEQ ID NO: 1711 - RNA, 23 nt, Artificial Sequence
  source: /note="Description of Artificial Sequence: Synthetic oligonucleotide"
ucuuccuuuaguaucucgaggac

SEQ ID NO: 1712 - RNA, 21 nt, Artificial Sequence
  source: /note="Description of Artificial Sequence: Synthetic oligonucleotide"
uccucgagauacuaaaggaag

SEQ ID NO: 1713 - RNA, 23 nt, Artificial Sequence
  source: /note="Description of Artificial Sequence: Synthetic oligonucleotide"
cuuccuuuaguaucucgaggaca

SEQ ID NO: 1714 - RNA, 21 nt, Artificial Sequence
  source: /note="Description of Artificial Sequence: Synthetic oligonucleotide"
acaacucaggaugaaaaauuu

SEQ ID NO: 1715 - RNA, 23 nt, Artificial Sequence
  source: /note="Description of Artificial Sequence: Synthetic oligonucleotide"
aaauuuuucauccugaguugugg

SEQ ID NO: 1716 - RNA, 21 nt, Artificial Sequence
  source: /note="Description of Artificial Sequence: Synthetic oligonucleotide"
caacucaggaugaaaaauuuu

SEQ ID NO: 1717 - RNA, 23 nt, Artificial Sequence
  source: /note="Description of Artificial Sequence: Synthetic oligonucleotide"
aaaauuuuucauccugaguugug

SEQ ID NO: 1718 - RNA, 21 nt, Artificial Sequence
  source: /note="Description of Artificial Sequence: Synthetic oligonucleotide"
cgccacaacucaggaugaaaa

SEQ ID NO: 1719 - RNA, 23 nt, Artificial Sequence
  source: /note="Description of Artificial Sequence: Synthetic oligonucleotide"
uuuucauccugaguuguggcggc

SEQ ID NO: 1720 - RNA, 21 nt, Artificial Sequence
  source: /note="Description of Artificial Sequence: Synthetic oligonucleotide"
ccgccacaacucaggaugaaa

SEQ ID NO: 1721 - RNA, 23 nt, Artificial Sequence
  source: /note="Description of Artificial Sequence: Synthetic oligonucleotide"
uuucauccugaguuguggcggca

SEQ ID NO: 1722 - RNA, 21 nt, Artificial Sequence
  source: /note="Description of Artificial Sequence: Synthetic oligonucleotide"
agggaagguggaagucuuccu

SEQ ID NO: 1723 - RNA, 23 nt, Artificial Sequence
  source: /note="Description of Artificial Sequence: Synthetic oligonucleotide"
aggaagacuuccaccuucccuuc

SEQ ID NO: 1724 - RNA, 21 nt, Artificial Sequence
  source: /note="Description of Artificial Sequence: Synthetic oligonucleotide"
gggaagguggaagucuuccug

SEQ ID NO: 1725 - RNA, 23 nt, Artificial Sequence
  source: /note="Description of Artificial Sequence: Synthetic oligonucleotide"
caggaagacuuccaccuucccuu

SEQ ID NO: 1726 - RNA, 21 nt, Artificial Sequence
  source: /note="Description of Artificial Sequence: Synthetic oligonucleotide"
uggaagggaagguggaagucu

SEQ ID NO: 1727 - RNA, 23 nt, Artificial Sequence
  source: /note="Description of Artificial Sequence: Synthetic oligonucleotide"
agacuuccaccuucccuuccaca

SEQ ID NO: 1728 - RNA, 21 nt, Artificial Sequence
  source: /note="Description of Artificial Sequence: Synthetic oligonucleotide"
guggaagggaagguggaaguc

SEQ ID NO: 1729 - RNA, 23 nt, Artificial Sequence
  source: /note="Description of Artificial Sequence: Synthetic oligonucleotide"
gacuuccaccuucccuuccacag

SEQ ID NO: 1730 - RNA, 21 nt, Artificial Sequence
  source: /note="Description of Artificial Sequence: Synthetic oligonucleotide"
ggcgagcuugccacugugaga

SEQ ID NO: 1731 - RNA, 23 nt, Artificial Sequence
  source: /note="Description of Artificial Sequence: Synthetic oligonucleotide"
ucucacaguggcaagcucgccgu

SEQ ID NO: 1732 - RNA, 21 nt, Artificial Sequence
  source: /note="Description of Artificial Sequence: Synthetic oligonucleotide"
gcgagcuugccacugugagag

SEQ ID NO: 1733 - RNA, 23 nt, Artificial Sequence
  source: /note="Description of Artificial Sequence: Synthetic oligonucleotide"
cucucacaguggcaagcucgccg

SEQ ID NO: 1734 - RNA, 21 nt, Artificial Sequence
  source: /note="Description of Artificial Sequence: Synthetic oligonucleotide"
ggacggcgagcuugccacugu

SEQ ID NO: 1735 - RNA, 23 nt, Artificial Sequence
  source: /note="Description of Artificial Sequence: Synthetic oligonucleotide"
acaguggcaagcucgccguccac

SEQ ID NO: 1736 - RNA, 21 nt, Artificial Sequence
  source: /note="Description of Artificial Sequence: Synthetic oligonucleotide"
uggacggcgagcuugccacug

SEQ ID NO: 1737 - RNA, 23 nt, Artificial Sequence
  source: /note="Description of Artificial Sequence: Synthetic oligonucleotide"
caguggcaagcucgccguccaca

SEQ ID NO: 1738 - RNA, 21 nt, Artificial Sequence
  source: /note="Description of Artificial Sequence: Synthetic oligonucleotide"
augugcguaacagauucaaac

SEQ ID NO: 1739 - RNA, 23 nt, Artificial Sequence
  source: /note="Description of Artificial Sequence: Synthetic oligonucleotide"
guuugaaucuguuacgcacauca

SEQ ID NO: 1740 - RNA, 21 nt, Artificial Sequence
  source: /note="Description of Artificial Sequence: Synthetic oligonucleotide"
ugugcguaacagauucaaacu

SEQ ID NO: 1741 - RNA, 23 nt, Artificial Sequence
  source: /note="Description of Artificial Sequence: Synthetic oligonucleotide"
aguuugaaucuguuacgcacauc

SEQ ID NO: 1742 - RNA, 21 nt, Artificial Sequence
  source: /note="Description of Artificial Sequence: Synthetic oligonucleotide"
gaugaugugcguaacagauuc

SEQ ID NO: 1743 - RNA, 23 nt, Artificial Sequence
  source: /note="Description of Artificial Sequence: Synthetic oligonucleotide"
gaaucuguuacgcacaucaucca

SEQ ID NO: 1744 - RNA, 21 nt, Artificial Sequence
  source: /note="Description of Artificial Sequence: Synthetic oligonucleotide"
ggaugaugugcguaacagauu

SEQ ID NO: 1745 - RNA, 23 nt, Artificial Sequence
  source: /note="Description of Artificial Sequence: Synthetic oligonucleotide"
aaucuguuacgcacaucauccag

SEQ ID NO: 1746 - RNA, 21 nt, Artificial Sequence
  source: /note="Description of Artificial Sequence: Synthetic oligonucleotide"
gggucagcaugccaauaugug

SEQ ID NO: 1747 - RNA, 23 nt, Artificial Sequence
  source: /note="Description of Artificial Sequence: Synthetic oligonucleotide"
cacauauuggcaugcugacccuc

SEQ ID NO: 1748 - RNA, 21 nt, Artificial Sequence
  source: /note="Description of Artificial Sequence: Synthetic oligonucleotide"
ggucagcaugccaauaugugu

SEQ ID NO: 1749 - RNA, 23 nt, Artificial Sequence
  source: /note="Description of Artificial Sequence: Synthetic oligonucleotide"
acacauauuggcaugcugacccu

SEQ ID NO: 1750 - RNA, 21 nt, Artificial Sequence
  source: /note="Description of Artificial Sequence: Synthetic oligonucleotide"
cagagggucagcaugccaaua

SEQ ID NO: 1751 - RNA, 23 nt, Artificial Sequence
  source: /note="Description of Artificial Sequence: Synthetic oligonucleotide"
uauuggcaugcugacccucuguc

SEQ ID NO: 1752 - RNA, 21 nt, Artificial Sequence
  source: /note="Description of Artificial Sequence: Synthetic oligonucleotide"
acagagggucagcaugccaau

SEQ ID NO: 1753 - RNA, 23 nt, Artificial Sequence
  source: /note="Description of Artificial Sequence: Synthetic oligonucleotide"
auuggcaugcugacccucugucc

SEQ ID NO: 1754 - RNA, 21 nt, Artificial Sequence
  source: /note="Description of Artificial Sequence: Synthetic oligonucleotide"
gcuugaaugggaucuuggugu

SEQ ID NO: 1755 - RNA, 23 nt, Artificial Sequence
  source: /note="Description of Artificial Sequence: Synthetic oligonucleotide"
acaccaagaucccauucaagcca

SEQ ID NO: 1756 - RNA, 21 nt, Artificial Sequence
  source: /note="Description of Artificial Sequence: Synthetic oligonucleotide"
cuugaaugggaucuugguguc

SEQ ID NO: 1757 - RNA, 23 nt, Artificial Sequence
  source: /note="Description of Artificial Sequence: Synthetic oligonucleotide"
gacaccaagaucccauucaagcc

SEQ ID NO: 1758 - RNA, 21 nt, Artificial Sequence
  source: /note="Description of Artificial Sequence: Synthetic oligonucleotide"
cauggcuugaaugggaucuug

SEQ ID NO: 1759 - RNA, 23 nt, Artificial Sequence
  source: /note="Description of Artificial Sequence: Synthetic oligonucleotide"
caagaucccauucaagccauguu

SEQ ID NO: 1760 - RNA, 21 nt, Artificial Sequence
  source: /note="Description of Artificial Sequence: Synthetic oligonucleotide"
acauggcuugaaugggaucuu

SEQ ID NO: 1761 - RNA, 23 nt, Artificial Sequence
  source: /note="Description of Artificial Sequence: Synthetic oligonucleotide"
aagaucccauucaagccauguuu

SEQ ID NO: 1762 - RNA, 21 nt, Artificial Sequence
  source: /note="Description of Artificial Sequence: Synthetic oligonucleotide"
ucaaauggcugagaagacuga

SEQ ID NO: 1763 - RNA, 23 nt, Artificial Sequence
  source: /note="Description of Artificial Sequence: Synthetic oligonucleotide"
ucagucuucucagccauuugaua

SEQ ID NO: 1764 - RNA, 21 nt, Artificial Sequence
  source: /note="Description of Artificial Sequence: Synthetic oligonucleotide"
caaauggcugagaagacugac

SEQ ID NO: 1765 - RNA, 23 nt, Artificial Sequence
  source: /note="Description of Artificial Sequence: Synthetic oligonucleotide"
gucagucuucucagccauuugau

SEQ ID NO: 1766 - RNA, 21 nt, Artificial Sequence
  source: /note="Description of Artificial Sequence: Synthetic oligonucleotide"
gauaucaaauggcugagaaga

SEQ ID NO: 1767 - RNA, 23 nt, Artificial Sequence
  source: /note="Description of Artificial Sequence: Synthetic oligonucleotide"
ucuucucagccauuugauaucuu

SEQ ID NO: 1768 - RNA, 21 nt, Artificial Sequence
  source: /note="Description of Artificial Sequence: Synthetic oligonucleotide"
agauaucaaauggcugagaag

SEQ ID NO: 1769 - RNA, 23 nt, Artificial Sequence
  source: /note="Description of Artificial Sequence: Synthetic oligonucleotide"
cuucucagccauuugauaucuuc

SEQ ID NO: 1770 - RNA, 21 nt, Artificial Sequence
  source: /note="Description of Artificial Sequence: Synthetic oligonucleotide"
gaaagucaucgacaagacauu

SEQ ID NO: 1771 - RNA, 23 nt, Artificial Sequence
  source: /note="Description of Artificial Sequence: Synthetic oligonucleotide"
aaugucuugucgaugacuuucac

SEQ ID NO: 1772 - RNA, 21 nt, Artificial Sequence
  source: /note="Description of Artificial Sequence: Synthetic oligonucleotide"
aaagucaucgacaagacauug

SEQ ID NO: 1773 - RNA, 23 nt, Artificial Sequence
  source: /note="Description of Artificial Sequence: Synthetic oligonucleotide"
caaugucuugucgaugacuuuca

SEQ ID NO: 1774 - RNA, 21 nt, Artificial Sequence
  source: /note="Description of Artificial Sequence: Synthetic oligonucleotide"
augugaaagucaucgacaaga

SEQ ID NO: 1775 - RNA, 23 nt, Artificial Sequence
  source: /note="Description of Artificial Sequence: Synthetic oligonucleotide"
ucuugucgaugacuuucacauuc

SEQ ID NO: 1776 - RNA, 21 nt, Artificial Sequence
  source: /note="Description of Artificial Sequence: Synthetic oligonucleotide"
aaugugaaagucaucgacaag

SEQ ID NO: 1777 - RNA, 23 nt, Artificial Sequence
  source: /note="Description of Artificial Sequence: Synthetic oligonucleotide"
cuugucgaugacuuucacauucu

SEQ ID NO: 1778 - RNA, 21 nt, Artificial Sequence
  source: /note="Description of Artificial Sequence: Synthetic oligonucleotide"
ggcuaauuuguaucaaugauu

SEQ ID NO: 1779 - RNA, 23 nt, Artificial Sequence
  source: /note="Description of Artificial Sequence: Synthetic oligonucleotide"
aaucauugauacaaauuagccgg

SEQ ID NO: 1780 - RNA, 21 nt, Artificial Sequence
  source: /note="Description of Artificial Sequence: Synthetic oligonucleotide"
gcuaauuuguaucaaugauua

SEQ ID NO: 1781 - RNA, 23 nt, Artificial Sequence
  source: /note="Description of Artificial Sequence: Synthetic oligonucleotide"
uaaucauugauacaaauuagccg

SEQ ID NO: 1782 - RNA, 21 nt, Artificial Sequence
  source: /note="Description of Artificial Sequence: Synthetic oligonucleotide"
ccccggcuaauuuguaucaau

SEQ ID NO: 1783 - RNA, 23 nt, Artificial Sequence
  source: /note="Description of Artificial Sequence: Synthetic oligonucleotide"
auugauacaaauuagccggggga

SEQ ID NO: 1784 - RNA, 21 nt, Artificial Sequence
  source: /note="Description of Artificial Sequence: Synthetic oligonucleotide"
cccccggcuaauuuguaucaa

SEQ ID NO: 1785 - RNA, 23 nt, Artificial Sequence
  source: /note="Description of Artificial Sequence: Synthetic oligonucleotide"
uugauacaaauuagccgggggag

SEQ ID NO: 1786 - RNA, 21 nt, Artificial Sequence
  source: /note="Description of Artificial Sequence: Synthetic oligonucleotide"
ugucgacuucuguuuuaggac

SEQ ID NO: 1787 - RNA, 23 nt, Artificial Sequence
  source: /note="Description of Artificial Sequence: Synthetic oligonucleotide"
guccuaaaacagaagucgacaga

SEQ ID NO: 1788 - RNA, 21 nt, Artificial Sequence
  source: /note="Description of Artificial Sequence: Synthetic oligonucleotide"
gucgacuucuguuuuaggaca

SEQ ID NO: 1789 - RNA, 23 nt, Artificial Sequence
  source: /note="Description of Artificial Sequence: Synthetic oligonucleotide"
uguccuaaaacagaagucgacag

SEQ ID NO: 1790 - RNA, 21 nt, Artificial Sequence
  source: /note="Description of Artificial Sequence: Synthetic oligonucleotide"
gaucugucgacuucuguuuua

SEQ ID NO: 1791 - RNA, 23 nt, Artificial Sequence
  source: /note="Description of Artificial Sequence: Synthetic oligonucleotide"
uaaaacagaagucgacagaucug

SEQ ID NO: 1792 - RNA, 21 nt, Artificial Sequence
  source: /note="Description of Artificial Sequence: Synthetic oligonucleotide"
agaucugucgacuucuguuuu

SEQ ID NO: 1793 - RNA, 23 nt, Artificial Sequence
  source: /note="Description of Artificial Sequence: Synthetic oligonucleotide"
aaaacagaagucgacagaucugu

SEQ ID NO: 1794 - RNA, 21 nt, Artificial Sequence
  source: /note="Description of Artificial Sequence: Synthetic oligonucleotide"
ccgagaagucaccaagaagcu

SEQ ID NO: 1795 - RNA, 23 nt, Artificial Sequence
  source: /note="Description of Artificial Sequence: Synthetic oligonucleotide"
agcuucuuggugacuucucgguc

SEQ ID NO: 1796 - RNA, 21 nt, Artificial Sequence
  source: /note="Description of Artificial Sequence: Synthetic oligonucleotide"
cgagaagucaccaagaagcua

SEQ ID NO: 1797 - RNA, 23 nt, Artificial Sequence
  source: /note="Description of Artificial Sequence: Synthetic oligonucleotide"
uagcuucuuggugacuucucggu

SEQ ID NO: 1798 - RNA, 21 nt, Artificial Sequence
  source: /note="Description of Artificial Sequence: Synthetic oligonucleotide"
aggaccgagaagucaccaaga

SEQ ID NO: 1799 - RNA, 23 nt, Artificial Sequence
  source: /note="Description of Artificial Sequence: Synthetic oligonucleotide"
ucuuggugacuucucgguccuug

SEQ ID NO: 1800 - RNA, 21 nt, Artificial Sequence
  source: /note="Description of Artificial Sequence: Synthetic oligonucleotide"
aaggaccgagaagucaccaag

SEQ ID NO: 1801 - RNA, 23 nt, Artificial Sequence
  source: /note="Description of Artificial Sequence: Synthetic oligonucleotide"
cuuggugacuucucgguccuugu

SEQ ID NO: 1802 - RNA, 21 nt, Artificial Sequence
  source: /note="Description of Artificial Sequence: Synthetic oligonucleotide"
aaacauggcuugaaugggauc

SEQ ID NO: 1803 - RNA, 23 nt, Artificial Sequence
  source: /note="Description of Artificial Sequence: Synthetic oligonucleotide"
gaucccauucaagccauguuuaa

SEQ ID NO: 1804 - RNA, 21 nt, Artificial Sequence
  source: /note="Description of Artificial Sequence: Synthetic oligonucleotide"
aacauggcuugaaugggaucu

SEQ ID NO: 1805 - RNA, 23 nt, Artificial Sequence
  source: /note="Description of Artificial Sequence: Synthetic oligonucleotide"
agaucccauucaagccauguuua

SEQ ID NO: 1806 - RNA, 21 nt, Artificial Sequence
  source: /note="Description of Artificial Sequence: Synthetic oligonucleotide"
uguuaaacauggcuugaaugg

SEQ ID NO: 1807 - RNA, 23 nt, Artificial Sequence
  source: /note="Description of Artificial Sequence: Synthetic oligonucleotide"
ccauucaagccauguuuaacagc

SEQ ID NO: 1808 - RNA, 21 nt, Artificial Sequence
  source: /note="Description of Artificial Sequence: Synthetic oligonucleotide"
cuguuaaacauggcuugaaug

SEQ ID NO: 1809 - RNA, 23 nt, Artificial Sequence
  source: /note="Description of Artificial Sequence: Synthetic oligonucleotide"
cauucaagccauguuuaacagcc

SEQ ID NO: 1810 - RNA, 21 nt, Artificial Sequence
  source: /note="Description of Artificial Sequence: Synthetic oligonucleotide"
gacuugcugcauauguggcua

SEQ ID NO: 1811 - RNA, 23 nt, Artificial Sequence
  source: /note="Description of Artificial Sequence: Synthetic oligonucleotide"
uagccacauaugcagcaagucca

SEQ ID NO: 1812 - RNA, 21 nt, Artificial Sequence
  source: /note="Description of Artificial Sequence: Synthetic oligonucleotide"
acuugcugcauauguggcuaa

SEQ ID NO: 1813 - RNA, 23 nt, Artificial Sequence
  source: /note="Description of Artificial Sequence: Synthetic oligonucleotide"
uuagccacauaugcagcaagucc

SEQ ID NO: 1814 - RNA, 21 nt, Artificial Sequence
  source: /note="Description of Artificial Sequence: Synthetic oligonucleotide"
aguggacuugcugcauaugug

SEQ ID NO: 1815 - RNA, 23 nt, Artificial Sequence
  source: /note="Description of Artificial Sequence: Synthetic oligonucleotide"
cacauaugcagcaaguccacugu

SEQ ID NO: 1816 - RNA, 21 nt, Artificial Sequence
  source: /note="Description of Artificial Sequence: Synthetic oligonucleotide"
caguggacuugcugcauaugu

SEQ ID NO: 1817 - RNA, 23 nt, Artificial Sequence
  source: /note="Description of Artificial Sequence: Synthetic oligonucleotide"
acauaugcagcaaguccacuguc

SEQ ID NO: 1818 - RNA, 21 nt, Artificial Sequence
  source: /note="Description of Artificial Sequence: Synthetic oligonucleotide"
uaaaucaguacuuccaaaguc

SEQ ID NO: 1819 - RNA, 23 nt, Artificial Sequence
  source: /note="Description of Artificial Sequence: Synthetic oligonucleotide"
gacuuuggaaguacugauuuagc

SEQ ID NO: 1820 - RNA, 21 nt, Artificial Sequence
  source: /note="Description of Artificial Sequence: Synthetic oligonucleotide"
aaaucaguacuuccaaagucu

SEQ ID NO: 1821 - RNA, 23 nt, Artificial Sequence
  source: /note="Description of Artificial Sequence: Synthetic oligonucleotide"
agacuuuggaaguacugauuuag

SEQ ID NO: 1822 - RNA, 21 nt, Artificial Sequence
  source: /note="Description of Artificial Sequence: Synthetic oligonucleotide"
augcuaaaucaguacuuccaa

SEQ ID NO: 1823 - RNA, 23 nt, Artificial Sequence
  source: /note="Description of Artificial Sequence: Synthetic oligonucleotide"
uuggaaguacugauuuagcaugu

SEQ ID NO: 1824 - RNA, 21 nt, Artificial Sequence
  source: /note="Description of Artificial Sequence: Synthetic oligonucleotide"
caugcuaaaucaguacuucca

SEQ ID NO: 1825 - RNA, 23 nt, Artificial Sequence
  source: /note="Description of Artificial Sequence: Synthetic oligonucleotide"
uggaaguacugauuuagcauguu

SEQ ID NO: 1826 - RNA, 21 nt, Artificial Sequence
  source: /note="Description of Artificial Sequence: Synthetic oligonucleotide"
uccucaauugaagaaguggcg

SEQ ID NO: 1827 - RNA, 23 nt, Artificial Sequence
  source: /note="Description of Artificial Sequence: Synthetic oligonucleotide"
cgccacuucuucaauugaggagg

SEQ ID NO: 1828 - RNA, 21 nt, Artificial Sequence
  source: /note="Description of Artificial Sequence: Synthetic oligonucleotide"
ccucaauugaagaaguggcgg

SEQ ID NO: 1829 - RNA, 23 nt, Artificial Sequence
  source: /note="Description of Artificial Sequence: Synthetic oligonucleotide"
ccgccacuucuucaauugaggag

SEQ ID NO: 1830 - RNA, 21 nt, Artificial Sequence
  source: /note="Description of Artificial Sequence: Synthetic oligonucleotide"
caccuccucaauugaagaagu

SEQ ID NO: 1831 - RNA, 23 nt, Artificial Sequence
  source: /note="Description of Artificial Sequence: Synthetic oligonucleotide"
acuucuucaauugaggagguggc

SEQ ID NO: 1832 - RNA, 21 nt, Artificial Sequence
  source: /note="Description of Artificial Sequence: Synthetic oligonucleotide"
ccaccuccucaauugaagaag

SEQ ID NO: 1833 - RNA, 23 nt, Artificial Sequence
  source: /note="Description of Artificial Sequence: Synthetic oligonucleotide"
cuucuucaauugaggagguggcc

SEQ ID NO: 1834 - RNA, 21 nt, Artificial Sequence
  source: /note="Description of Artificial Sequence: Synthetic oligonucleotide"
caagauguccucgagauacua

SEQ ID NO: 1835 - RNA, 23 nt, Artificial Sequence
  source: /note="Description of Artificial Sequence: Synthetic oligonucleotide"
uaguaucucgaggacaucuugaa

SEQ ID NO: 1836 - RNA, 21 nt, Artificial Sequence
  source: /note="Description of Artificial Sequence: Synthetic oligonucleotide"
aagauguccucgagauacuaa

SEQ ID NO: 1837 - RNA, 23 nt, Artificial Sequence
  source: /note="Description of Artificial Sequence: Synthetic oligonucleotide"
uuaguaucucgaggacaucuuga

SEQ ID NO: 1838 - RNA, 21 nt, Artificial Sequence
  source: /note="Description of Artificial Sequence: Synthetic oligonucleotide"
uguucaagauguccucgagau

SEQ ID NO: 1839 - RNA, 23 nt, Artificial Sequence
  source: /note="Description of Artificial Sequence: Synthetic oligonucleotide"
aucucgaggacaucuugaacacc

SEQ ID NO: 1840 - RNA, 21 nt, Artificial Sequence
  source: /note="Description of Artificial Sequence: Synthetic oligonucleotide"
guguucaagauguccucgaga

SEQ ID NO: 1841 - RNA, 23 nt, Artificial Sequence
  source: /note="Description of Artificial Sequence: Synthetic oligonucleotide"
ucucgaggacaucuugaacaccu

SEQ ID NO: 1842 - RNA, 21 nt, Artificial Sequence
  source: /note="Description of Artificial Sequence: Synthetic oligonucleotide"
acaugcuaaaucaguacuucc

SEQ ID NO: 1843 - RNA, 23 nt, Artificial Sequence
  source: /note="Description of Artificial Sequence: Synthetic oligonucleotide"
ggaaguacugauuuagcauguug

SEQ ID NO: 1844 - RNA, 21 nt, Artificial Sequence
  source: /note="Description of Artificial Sequence: Synthetic oligonucleotide"
caugcuaaaucaguacuucca

SEQ ID NO: 1845 - RNA, 23 nt, Artificial Sequence
  source: /note="Description of Artificial Sequence: Synthetic oligonucleotide"
uggaaguacugauuuagcauguu

SEQ ID NO: 1846 - RNA, 21 nt, Artificial Sequence
  source: /note="Description of Artificial Sequence: Synthetic oligonucleotide"
aacaacaugcuaaaucaguac

SEQ ID NO: 1847 - RNA, 23 nt, Artificial Sequence
  source: /note="Description of Artificial Sequence: Synthetic oligonucleotide"
guacugauuuagcauguuguuca

SEQ ID NO: 1848 - RNA, 21 nt, Artificial Sequence
  source: /note="Description of Artificial Sequence: Synthetic oligonucleotide"
gaacaacaugcuaaaucagua

SEQ ID NO: 1849 - RNA, 23 nt, Artificial Sequence
  source: /note="Description of Artificial Sequence: Synthetic oligonucleotide"
uacugauuuagcauguuguucau

SEQ ID NO: 1850 - RNA, 21 nt, Artificial Sequence
  source: /note="Description of Artificial Sequence: Synthetic oligonucleotide"
gaaaggcacugauguucugaa

SEQ ID NO: 1851 - RNA, 23 nt, Artificial Sequence
  source: /note="Description of Artificial Sequence: Synthetic oligonucleotide"
uucagaacaucagugccuuuccg

SEQ ID NO: 1852 - RNA, 21 nt, Artificial Sequence
  source: /note="Description of Artificial Sequence: Synthetic oligonucleotide"
aaaggcacugauguucugaaa

SEQ ID NO: 1853 - RNA, 23 nt, Artificial Sequence
  source: /note="Description of Artificial Sequence: Synthetic oligonucleotide"
uuucagaacaucagugccuuucc

SEQ ID NO: 1854 - RNA, 21 nt, Artificial Sequence
  source: /note="Description of Artificial Sequence: Synthetic oligonucleotide"
ugcggaaaggcacugauguuc

SEQ ID NO: 1855 - RNA, 23 nt, Artificial Sequence
  source: /note="Description of Artificial Sequence: Synthetic oligonucleotide"
gaacaucagugccuuuccgcaca

SEQ ID NO: 1856 - RNA, 21 nt, Artificial Sequence
  source: /note="Description of Artificial Sequence: Synthetic oligonucleotide"
gugcggaaaggcacugauguu

SEQ ID NO: 1857 - RNA, 23 nt, Artificial Sequence
  source: /note="Description of Artificial Sequence: Synthetic oligonucleotide"
aacaucagugccuuuccgcacac

SEQ ID NO: 1858 - RNA, 21 nt, Artificial Sequence
  source: /note="Description of Artificial Sequence: Synthetic oligonucleotide"
gucagcaugccaauaugugug

SEQ ID NO: 1859 - RNA, 23 nt, Artificial Sequence
  source: /note="Description of Artificial Sequence: Synthetic oligonucleotide"
cacacauauuggcaugcugaccc

SEQ ID NO: 1860 - RNA, 21 nt, Artificial Sequence
  source: /note="Description of Artificial Sequence: Synthetic oligonucleotide"
ucagcaugccaauaugugugg

SEQ ID NO: 1861 - RNA, 23 nt, Artificial Sequence
  source: /note="Description of Artificial Sequence: Synthetic oligonucleotide"
ccacacauauuggcaugcugacc

SEQ ID NO: 1862 - RNA, 21 nt, Artificial Sequence
  source: /note="Description of Artificial Sequence: Synthetic oligonucleotide"
gagggucagcaugccaauaug

SEQ ID NO: 1863 - RNA, 23 nt, Artificial Sequence
  source: /note="Description of Artificial Sequence: Synthetic oligonucleotide"
cauauuggcaugcugacccucug

SEQ ID NO: 1864 - RNA, 21 nt, Artificial Sequence
  source: /note="Description of Artificial Sequence: Synthetic oligonucleotide"
agagggucagcaugccaauau

SEQ ID NO: 1865 - RNA, 23 nt, Artificial Sequence
  source: /note="Description of Artificial Sequence: Synthetic oligonucleotide"
auauuggcaugcugacccucugu

SEQ ID NO: 1866 - RNA, 21 nt, Artificial Sequence
  source: /note="Description of Artificial Sequence: Synthetic oligonucleotide"
gaugcuccggaauguugcuga

SEQ ID NO: 1867 - RNA, 23 nt, Artificial Sequence
  source: /note="Description of Artificial Sequence: Synthetic oligonucleotide"
ucagcaacauuccggagcauccu

SEQ ID NO: 1868 - RNA, 21 nt, Artificial Sequence
  source: /note="Description of Artificial Sequence: Synthetic oligonucleotide"
augcuccggaauguugcugaa

SEQ ID NO: 1869 - RNA, 23 nt, Artificial Sequence
  source: /note="Description of Artificial Sequence: Synthetic oligonucleotide"
uucagcaacauuccggagcaucc

SEQ ID NO: 1870 - RNA, 21 nt, Artificial Sequence
  source: /note="Description of Artificial Sequence: Synthetic oligonucleotide"
caaggaugcuccggaauguug

SEQ ID NO: 1871 - RNA, 23 nt, Artificial Sequence
  source: /note="Description of Artificial Sequence: Synthetic oligonucleotide"
caacauuccggagcauccuugga

SEQ ID NO: 1872 - RNA, 21 nt, Artificial Sequence
  source: /note="Description of Artificial Sequence: Synthetic oligonucleotide"
ccaaggaugcuccggaauguu

SEQ ID NO: 1873 - RNA, 23 nt, Artificial Sequence
  source: /note="Description of Artificial Sequence: Synthetic oligonucleotide"
aacauuccggagcauccuuggau

SEQ ID NO: 1874 - RNA, 21 nt, Artificial Sequence
  source: /note="Description of Artificial Sequence: Synthetic oligonucleotide"
gcguaacagauucaaacugcc

SEQ ID NO: 1875 - RNA, 23 nt, Artificial Sequence
  source: /note="Description of Artificial Sequence: Synthetic oligonucleotide"
ggcaguuugaaucuguuacgcac

SEQ ID NO: 1876 - RNA, 21 nt, Artificial Sequence
  source: /note="Description of Artificial Sequence: Synthetic oligonucleotide"
cguaacagauucaaacugccg

SEQ ID NO: 1877 - RNA, 23 nt, Artificial Sequence
  source: /note="Description of Artificial Sequence: Synthetic oligonucleotide"
cggcaguuugaaucuguuacgca

SEQ ID NO: 1878 - RNA, 21 nt, Artificial Sequence
  source: /note="Description of Artificial Sequence: Synthetic oligonucleotide"
augugcguaacagauucaaac

SEQ ID NO: 1879 - RNA, 23 nt, Artificial Sequence
  source: /note="Description of Artificial Sequence: Synthetic oligonucleotide"
guuugaaucuguuacgcacauca

SEQ ID NO: 1880 - RNA, 21 nt, Artificial Sequence
  source: /note="Description of Artificial Sequence: Synthetic oligonucleotide"
gaugugcguaacagauucaaa

SEQ ID NO: 1881 - RNA, 23 nt, Artificial Sequence
  source: /note="Description of Artificial Sequence: Synthetic oligonucleotide"
uuugaaucuguuacgcacaucau

SEQ ID NO: 1882 - RNA, 21 nt, Artificial Sequence
  source: /note="Description of Artificial Sequence: Synthetic oligonucleotide"
agagaagaugggcuacaaggc

SEQ ID NO: 1883 - RNA, 23 nt, Artificial Sequence
  source: /note="Description of Artificial Sequence: Synthetic oligonucleotide"
gccuuguagcccaucuucucugc

SEQ ID NO: 1884 - RNA, 21 nt, Artificial Sequence
  source: /note="Description of Artificial Sequence: Synthetic oligonucleotide"
gagaagaugggcuacaaggcc

SEQ ID NO: 1885 - RNA, 23 nt, Artificial Sequence
  source: /note="Description of Artificial Sequence: Synthetic oligonucleotide"
ggccuuguagcccaucuucucug

SEQ ID NO: 1886 - RNA, 21 nt, Artificial Sequence
  source: /note="Description of Artificial Sequence: Synthetic oligonucleotide"
aggcagagaagaugggcuaca

SEQ ID NO: 1887 - RNA, 23 nt, Artificial Sequence
  source: /note="Description of Artificial Sequence: Synthetic oligonucleotide"
uguagcccaucuucucugccugc

SEQ ID NO: 1888 - RNA, 21 nt, Artificial Sequence
  source: /note="Description of Artificial Sequence: Synthetic oligonucleotide"
caggcagagaagaugggcuac

SEQ ID NO: 1889 - RNA, 23 nt, Artificial Sequence
  source: /note="Description of Artificial Sequence: Synthetic oligonucleotide"
guagcccaucuucucugccugcc

SEQ ID NO: 1890 - RNA, 21 nt, Artificial Sequence
  source: /note="Description of Artificial Sequence: Synthetic oligonucleotide"
auguauguuacuucuuagaga

SEQ ID NO: 1891 - RNA, 23 nt, Artificial Sequence
  source: /note="Description of Artificial Sequence: Synthetic oligonucleotide"
ucucuaagaaguaacauacaucc

SEQ ID NO: 1892 - RNA, 21 nt, Artificial Sequence
  source: /note="Description of Artificial Sequence: Synthetic oligonucleotide"
uguauguuacuucuuagagag

SEQ ID NO: 1893 - RNA, 23 nt, Artificial Sequence
  source: /note="Description of Artificial Sequence: Synthetic oligonucleotide"
cucucuaagaaguaacauacauc

SEQ ID NO: 1894 - RNA, 21 nt, Artificial Sequence
  source: /note="Description of Artificial Sequence: Synthetic oligonucleotide"
uaggauguauguuacuucuua

SEQ ID NO: 1895 - RNA, 23 nt, Artificial Sequence
  source: /note="Description of Artificial Sequence: Synthetic oligonucleotide"
uaagaaguaacauacauccuaaa

SEQ ID NO: 1896 - RNA, 21 nt, Artificial Sequence
  source: /note="Description of Artificial Sequence: Synthetic oligonucleotide"
uuaggauguauguuacuucuu

SEQ ID NO: 1897 - RNA, 23 nt, Artificial Sequence
  source: /note="Description of Artificial Sequence: Synthetic oligonucleotide"
aagaaguaacauacauccuaaaa

SEQ ID NO: 1898 - RNA, 21 nt, Artificial Sequence
  source: /note="Description of Artificial Sequence: Synthetic oligonucleotide"
agaaagguguucaagaugucc

SEQ ID NO: 1899 - RNA, 23 nt, Artificial Sequence
  source: /note="Description of Artificial Sequence: Synthetic oligonucleotide"
ggacaucuugaacaccuuucucc

SEQ ID NO: 1900 - RNA, 21 nt, Artificial Sequence
  source: /note="Description of Artificial Sequence: Synthetic oligonucleotide"
gaaagguguucaagauguccu

SEQ ID NO: 1901 - RNA, 23 nt, Artificial Sequence
  source: /note="Description of Artificial Sequence: Synthetic oligonucleotide"
aggacaucuugaacaccuuucuc

SEQ ID NO: 1902 - RNA, 21 nt, Artificial Sequence
  source: /note="Description of Artificial Sequence: Synthetic oligonucleotide"
ggggagaaagguguucaagau

SEQ ID NO: 1903 - RNA, 23 nt, Artificial Sequence
  source: /note="Description of Artificial Sequence: Synthetic oligonucleotide"
aucuugaacaccuuucucccccu

SEQ ID NO: 1904 - RNA, 21 nt, Artificial Sequence
  source: /note="Description of Artificial Sequence: Synthetic oligonucleotide"
gggggagaaagguguucaaga

SEQ ID NO: 1905 - RNA, 23 nt, Artificial Sequence
  source: /note="Description of Artificial Sequence: Synthetic oligonucleotide"
ucuugaacaccuuucucccccug

SEQ ID NO: 1906 - RNA, 21 nt, Artificial Sequence
  source: /note="Description of Artificial Sequence: Synthetic oligonucleotide"
agaaacuuuggcugauaauau

SEQ ID NO: 1907 - RNA, 23 nt, Artificial Sequence
  source: /note="Description of Artificial Sequence: Synthetic oligonucleotide"
auauuaucagccaaaguuucuuc

SEQ ID NO: 1908 - RNA, 21 nt, Artificial Sequence
  source: /note="Description of Artificial Sequence: Synthetic oligonucleotide"
gaaacuuuggcugauaauauu

SEQ ID NO: 1909 - RNA, 23 nt, Artificial Sequence
  source: /note="Description of Artificial Sequence: Synthetic oligonucleotide"
aauauuaucagccaaaguuucuu

SEQ ID NO: 1910 - RNA, 21 nt, Artificial Sequence
  source: /note="Description of Artificial Sequence: Synthetic oligonucleotide"
augaagaaacuuuggcugaua

SEQ ID NO: 1911 - RNA, 23 nt, Artificial Sequence
  source: /note="Description of Artificial Sequence: Synthetic oligonucleotide"
uaucagccaaaguuucuucauca

SEQ ID NO: 1912 - RNA, 21 nt, Artificial Sequence
  source: /note="Description of Artificial Sequence: Synthetic oligonucleotide"
gaugaagaaacuuuggcugau

SEQ ID NO: 1913 - RNA, 23 nt, Artificial Sequence
  source: /note="Description of Artificial Sequence: Synthetic oligonucleotide"
aucagccaaaguuucuucaucau

SEQ ID NO: 1914 - RNA, 21 nt, Artificial Sequence
  source: /note="Description of Artificial Sequence: Synthetic oligonucleotide"
aaggcacugauguucugaaag

SEQ ID NO: 1915 - RNA, 23 nt, Artificial Sequence
  source: /note="Description of Artificial Sequence: Synthetic oligonucleotide"
cuuucagaacaucagugccuuuc

SEQ ID NO: 1916 - RNA, 21 nt, Artificial Sequence
  source: /note="Description of Artificial Sequence: Synthetic oligonucleotide"
aggcacugauguucugaaagc

SEQ ID NO: 1917 - RNA, 23 nt, Artificial Sequence
  source: /note="Description of Artificial Sequence: Synthetic oligonucleotide"
gcuuucagaacaucagugccuuu

SEQ ID NO: 1918 - RNA, 21 nt, Artificial Sequence
  source: /note="Description of Artificial Sequence: Synthetic oligonucleotide"
cggaaaggcacugauguucug

SEQ ID NO: 1919 - RNA, 23 nt, Artificial Sequence
  source: /note="Description of Artificial Sequence: Synthetic oligonucleotide"
cagaacaucagugccuuuccgca

SEQ ID NO: 1920 - RNA, 21 nt, Artificial Sequence
  source: /note="Description of Artificial Sequence: Synthetic oligonucleotide"
gcggaaaggcacugauguucu

SEQ ID NO: 1921 - RNA, 23 nt, Artificial Sequence
  source: /note="Description of Artificial Sequence: Synthetic oligonucleotide"
agaacaucagugccuuuccgcac

SEQ ID NO: 1922 - RNA, 21 nt, Artificial Sequence
  source: /note="Description of Artificial Sequence: Synthetic oligonucleotide"
agaagacugacaucauugcca

SEQ ID NO: 1923 - RNA, 23 nt, Artificial Sequence
  source: /note="Description of Artificial Sequence: Synthetic oligonucleotide"
uggcaaugaugucagucuucuca

SEQ ID NO: 1924 - RNA, 21 nt, Artificial Sequence
  source: /note="Description of Artificial Sequence: Synthetic oligonucleotide"
gaagacugacaucauugccaa

SEQ ID NO: 1925 - RNA, 23 nt, Artificial Sequence
  source: /note="Description of Artificial Sequence: Synthetic oligonucleotide"
uuggcaaugaugucagucuucuc

SEQ ID NO: 1926 - RNA, 21 nt, Artificial Sequence
  source: /note="Description of Artificial Sequence: Synthetic oligonucleotide"
gcugagaagacugacaucauu

SEQ ID NO: 1927 - RNA, 23 nt, Artificial Sequence
  source: /note="Description of Artificial Sequence: Synthetic oligonucleotide"
aaugaugucagucuucucagcca

SEQ ID NO: 1928 - RNA, 21 nt, Artificial Sequence
  source: /note="Description of Artificial Sequence: Synthetic oligonucleotide"
ggcugagaagacugacaucau

SEQ ID NO: 1929 - RNA, 23 nt, Artificial Sequence
  source: /note="Description of Artificial Sequence: Synthetic oligonucleotide"
augaugucagucuucucagccau

SEQ ID NO: 1930 - RNA, 21 nt, Artificial Sequence
  source: /note="Description of Artificial Sequence: Synthetic oligonucleotide"
uaaugccugauucacaacuuu

SEQ ID NO: 1931 - RNA, 23 nt, Artificial Sequence
  source: /note="Description of Artificial Sequence: Synthetic oligonucleotide"
aaaguugugaaucaggcauuacc

SEQ ID NO: 1932 - RNA, 21 nt, Artificial Sequence
  source: /note="Description of Artificial Sequence: Synthetic oligonucleotide"
aaugccugauucacaacuuug

SEQ ID NO: 1933 - RNA, 23 nt, Artificial Sequence
  source: /note="Description of Artificial Sequence: Synthetic oligonucleotide"
caaaguugugaaucaggcauuac

SEQ ID NO: 1934 - RNA, 21 nt, Artificial Sequence
  source: /note="Description of Artificial Sequence: Synthetic oligonucleotide"
uugguaaugccugauucacaa

SEQ ID NO: 1935 - RNA, 23 nt, Artificial Sequence
  source: /note="Description of Artificial Sequence: Synthetic oligonucleotide"
uugugaaucaggcauuaccaaca

SEQ ID NO: 1936 - RNA, 21 nt, Artificial Sequence
  source: /note="Description of Artificial Sequence: Synthetic oligonucleotide"
guugguaaugccugauucaca

SEQ ID NO: 1937 - RNA, 23 nt, Artificial Sequence
  source: /note="Description of Artificial Sequence: Synthetic oligonucleotide"
ugugaaucaggcauuaccaacac

SEQ ID NO: 1938 - RNA, 21 nt, Artificial Sequence
  source: /note="Description of Artificial Sequence: Synthetic oligonucleotide"
uaucaaauggcugagaagacu

SEQ ID NO: 1939 - RNA, 23 nt, Artificial Sequence
  source: /note="Description of Artificial Sequence: Synthetic oligonucleotide"
agucuucucagccauuugauauc

SEQ ID NO: 1940 - RNA, 21 nt, Artificial Sequence
  source: /note="Description of Artificial Sequence: Synthetic oligonucleotide"
aucaaauggcugagaagacug

SEQ ID NO: 1941 - RNA, 23 nt, Artificial Sequence
  source: /note="Description of Artificial Sequence: Synthetic oligonucleotide"
cagucuucucagccauuugauau

SEQ ID NO: 1942 - RNA, 21 nt, Artificial Sequence
  source: /note="Description of Artificial Sequence: Synthetic oligonucleotide"
aagauaucaaauggcugagaa

SEQ ID NO: 1943 - RNA, 23 nt, Artificial Sequence
  source: /note="Description of Artificial Sequence: Synthetic oligonucleotide"
uucucagccauuugauaucuucc

SEQ ID NO: 1944 - RNA, 21 nt, Artificial Sequence
  source: /note="Description of Artificial Sequence: Synthetic oligonucleotide"
gaagauaucaaauggcugaga

SEQ ID NO: 1945 - RNA, 23 nt, Artificial Sequence
  source: /note="Description of Artificial Sequence: Synthetic oligonucleotide"
ucucagccauuugauaucuuccc

SEQ ID NO: 1946 - RNA, 21 nt, Artificial Sequence
  source: /note="Description of Artificial Sequence: Synthetic oligonucleotide"
ucugacagugcacaauauuuu

SEQ ID NO: 1947 - RNA, 23 nt, Artificial Sequence
  source: /note="Description of Artificial Sequence: Synthetic oligonucleotide"
aaaauauugugcacugucagauc

SEQ ID NO: 1948 - RNA, 21 nt, Artificial Sequence
  source: /note="Description of Artificial Sequence: Synthetic oligonucleotide"
cugacagugcacaauauuuuc

SEQ ID NO: 1949 - RNA, 23 nt, Artificial Sequence
  source: /note="Description of Artificial Sequence: Synthetic oligonucleotide"
gaaaauauugugcacugucagau

SEQ ID NO: 1950 - RNA, 21 nt, Artificial Sequence
  source: /note="Description of Artificial Sequence: Synthetic oligonucleotide"
aagaucugacagugcacaaua

SEQ ID NO: 1951 - RNA, 23 nt, Artificial Sequence
  source: /note="Description of Artificial Sequence: Synthetic oligonucleotide"
uauugugcacugucagaucuugg

SEQ ID NO: 1952 - RNA, 21 nt, Artificial Sequence
  source: /note="Description of Artificial Sequence: Synthetic oligonucleotide"
caagaucugacagugcacaau

SEQ ID NO: 1953 - RNA, 23 nt, Artificial Sequence
  source: /note="Description of Artificial Sequence: Synthetic oligonucleotide"
auugugcacugucagaucuugga

SEQ ID NO: 1954 - RNA, 21 nt, Artificial Sequence
  source: /note="Description of Artificial Sequence: Synthetic oligonucleotide"
acugauguucugaaagcucug

SEQ ID NO: 1955 - RNA, 23 nt, Artificial Sequence
  source: /note="Description of Artificial Sequence: Synthetic oligonucleotide"
cagagcuuucagaacaucagugc

SEQ ID NO: 1956 - RNA, 21 nt, Artificial Sequence
  source: /note="Description of Artificial Sequence: Synthetic oligonucleotide"
cugauguucugaaagcucugg

SEQ ID NO: 1957 - RNA, 23 nt, Artificial Sequence
  source: /note="Description of Artificial Sequence: Synthetic oligonucleotide"
ccagagcuuucagaacaucagug

SEQ ID NO: 1958 - RNA, 21 nt, Artificial Sequence
  source: /note="Description of Artificial Sequence: Synthetic oligonucleotide"
aggcacugauguucugaaagc

SEQ ID NO: 1959 - RNA, 23 nt, Artificial Sequence
  source: /note="Description of Artificial Sequence: Synthetic oligonucleotide"
gcuuucagaacaucagugccuuu

SEQ ID NO: 1960 - RNA, 21 nt, Artificial Sequence
  source: /note="Description of Artificial Sequence: Synthetic oligonucleotide"
aaggcacugauguucugaaag

SEQ ID NO: 1961 - RNA, 23 nt, Artificial Sequence
  source: /note="Description of Artificial Sequence: Synthetic oligonucleotide"
cuuucagaacaucagugccuuuc

SEQ ID NO: 1962 - RNA, 21 nt, Artificial Sequence
  source: /note="Description of Artificial Sequence: Synthetic oligonucleotide"
aacaacaugcuaaaucaguac

SEQ ID NO: 1963 - RNA, 23 nt, Artificial Sequence
  source: /note="Description of Artificial Sequence: Synthetic oligonucleotide"
guacugauuuagcauguuguuca

SEQ ID NO: 1964 - RNA, 21 nt, Artificial Sequence
  source: /note="Description of Artificial Sequence: Synthetic oligonucleotide"
acaacaugcuaaaucaguacu

SEQ ID NO: 1965 - RNA, 23 nt, Artificial Sequence
  source: /note="Description of Artificial Sequence: Synthetic oligonucleotide"
aguacugauuuagcauguuguuc

SEQ ID NO: 1966 - RNA, 21 nt, Artificial Sequence
  source: /note="Description of Artificial Sequence: Synthetic oligonucleotide"
uaugaacaacaugcuaaauca

SEQ ID NO: 1967 - RNA, 23 nt, Artificial Sequence
  source: /note="Description of Artificial Sequence: Synthetic oligonucleotide"
ugauuuagcauguuguucauaau

SEQ ID NO: 1968 - RNA, 21 nt, Artificial Sequence
  source: /note="Description of Artificial Sequence: Synthetic oligonucleotide"
uuaugaacaacaugcuaaauc

SEQ ID NO: 1969 - RNA, 23 nt, Artificial Sequence
  source: /note="Description of Artificial Sequence: Synthetic oligonucleotide"
gauuuagcauguuguucauaauc

SEQ ID NO: 1970 - RNA, 21 nt, Artificial Sequence
  source: /note="Description of Artificial Sequence: Synthetic oligonucleotide"
ucuuuagugucugaauauauc

SEQ ID NO: 1971 - RNA, 23 nt, Artificial Sequence
  source: /note="Description of Artificial Sequence: Synthetic oligonucleotide"
gauauauucagacacuaaagaug

SEQ ID NO: 1972 - RNA, 21 nt, Artificial Sequence
  source: /note="Description of Artificial Sequence: Synthetic oligonucleotide"
cuuuagugucugaauauaucc

SEQ ID NO: 1973 - RNA, 23 nt, Artificial Sequence
  source: /note="Description of Artificial Sequence: Synthetic oligonucleotide"
ggauauauucagacacuaaagau

SEQ ID NO: 1974 - RNA, 21 nt, Artificial Sequence
  source: /note="Description of Artificial Sequence: Synthetic oligonucleotide"
cacaucuuuagugucugaaua

SEQ ID NO: 1975 - RNA, 23 nt, Artificial Sequence
  source: /note="Description of Artificial Sequence: Synthetic oligonucleotide"
uauucagacacuaaagaugugau

SEQ ID NO: 1976 - RNA, 21 nt, Artificial Sequence
  source: /note="Description of Artificial Sequence: Synthetic oligonucleotide"
ucacaucuuuagugucugaau

SEQ ID NO: 1977 - RNA, 23 nt, Artificial Sequence
  source: /note="Description of Artificial Sequence: Synthetic oligonucleotide"
auucagacacuaaagaugugauu

SEQ ID NO: 1978 - RNA, 21 nt, Artificial Sequence
  source: /note="Description of Artificial Sequence: Synthetic oligonucleotide"
ugauacuucuuugaauguaga

SEQ ID NO: 1979 - RNA, 23 nt, Artificial Sequence
  source: /note="Description of Artificial Sequence: Synthetic oligonucleotide"
ucuacauucaaagaaguaucacc

SEQ ID NO: 1980 - RNA, 21 nt, Artificial Sequence
  source: /note="Description of Artificial Sequence: Synthetic oligonucleotide"
gauacuucuuugaauguagau

SEQ ID NO: 1981 - RNA, 23 nt, Artificial Sequence
  source: /note="Description of Artificial Sequence: Synthetic oligonucleotide"
aucuacauucaaagaaguaucac

SEQ ID NO: 1982 - RNA, 21 nt, Artificial Sequence
  source: /note="Description of Artificial Sequence: Synthetic oligonucleotide"
uuggugauacuucuuugaaug

SEQ ID NO: 1983 - RNA, 23 nt, Artificial Sequence
  source: /note="Description of Artificial Sequence: Synthetic oligonucleotide"
cauucaaagaaguaucaccaauu

SEQ ID NO: 1984 - RNA, 21 nt, Artificial Sequence
  source: /note="Description of Artificial Sequence: Synthetic oligonucleotide"
auuggugauacuucuuugaau

SEQ ID NO: 1985 - RNA, 23 nt, Artificial Sequence
  source: /note="Description of Artificial Sequence: Synthetic oligonucleotide"
auucaaagaaguaucaccaauua

SEQ ID NO: 1986 - RNA, 21 nt, Artificial Sequence
  source: /note="Description of Artificial Sequence: Synthetic oligonucleotide"
aauaaccugugaaaaugcucc

SEQ ID NO: 1987 - RNA, 23 nt, Artificial Sequence
  source: /note="Description of Artificial Sequence: Synthetic oligonucleotide"
ggagcauuuucacagguuauugc

SEQ ID NO: 1988 - RNA, 21 nt, Artificial Sequence
  source: /note="Description of Artificial Sequence: Synthetic oligonucleotide"
auaaccugugaaaaugcuccc

SEQ ID NO: 1989 - RNA, 23 nt, Artificial Sequence
  source: /note="Description of Artificial Sequence: Synthetic oligonucleotide"
gggagcauuuucacagguuauug

SEQ ID NO: 1990 - RNA, 21 nt, Artificial Sequence
  source: /note="Description of Artificial Sequence: Synthetic oligonucleotide"
uagcaauaaccugugaaaaug

SEQ ID NO: 1991 - RNA, 23 nt, Artificial Sequence
  source: /note="Description of Artificial Sequence: Synthetic oligonucleotide"
cauuuucacagguuauugcuauc

SEQ ID NO: 1992 - RNA, 21 nt, Artificial Sequence
  source: /note="Description of Artificial Sequence: Synthetic oligonucleotide"
auagcaauaaccugugaaaau

SEQ ID NO: 1993 - RNA, 23 nt, Artificial Sequence
  source: /note="Description of Artificial Sequence: Synthetic oligonucleotide"
auuuucacagguuauugcuaucc

SEQ ID NO: 1994 - RNA, 21 nt, Artificial Sequence
  source: /note="Description of Artificial Sequence: Synthetic oligonucleotide"
aaucacaucuuuagugucuga

SEQ ID NO: 1995 - RNA, 23 nt, Artificial Sequence
  source: /note="Description of Artificial Sequence: Synthetic oligonucleotide"
ucagacacuaaagaugugauugg

SEQ ID NO: 1996 - RNA, 21 nt, Artificial Sequence
  source: /note="Description of Artificial Sequence: Synthetic oligonucleotide"
aucacaucuuuagugucugaa

SEQ ID NO: 1997 - RNA, 23 nt, Artificial Sequence
  source: /note="Description of Artificial Sequence: Synthetic oligonucleotide"
uucagacacuaaagaugugauug

SEQ ID NO: 1998 - RNA, 21 nt, Artificial Sequence
  source: /note="Description of Artificial Sequence: Synthetic oligonucleotide"
uuccaaucacaucuuuagugu

SEQ ID NO: 1999 - RNA, 23 nt, Artificial Sequence
  source: /note="Description of Artificial Sequence: Synthetic oligonucleotide"
acacuaaagaugugauuggaaau

SEQ ID NO: 2000 - RNA, 21 nt, Artificial Sequence
  source: /note="Description of Artificial Sequence: Synthetic oligonucleotide"
uuuccaaucacaucuuuagug

SEQ ID NO: 2001 - RNA, 23 nt, Artificial Sequence
  source: /note="Description of Artificial Sequence: Synthetic oligonucleotide"
cacuaaagaugugauuggaaauc

SEQ ID NO: 2002 - RNA, 21 nt, Artificial Sequence
  source: /note="Description of Artificial Sequence: Synthetic oligonucleotide"
acgggcaugauguugaguucc

SEQ ID NO: 2003 - RNA, 23 nt, Artificial Sequence
  source: /note="Description of Artificial Sequence: Synthetic oligonucleotide"
ggaacucaacaucaugcccguuc

SEQ ID NO: 2004 - RNA, 21 nt, Artificial Sequence
  source: /note="Description of Artificial Sequence: Synthetic oligonucleotide"
cgggcaugauguugaguuccu

SEQ ID NO: 2005 - RNA, 23 nt, Artificial Sequence
  source: /note="Description of Artificial Sequence: Synthetic oligonucleotide"
aggaacucaacaucaugcccguu

SEQ ID NO: 2006 - RNA, 21 nt, Artificial Sequence
  source: /note="Description of Artificial Sequence: Synthetic oligonucleotide"
gggaacgggcaugauguugag

SEQ ID NO: 2007 - RNA, 23 nt, Artificial Sequence
  source: /note="Description of Artificial Sequence: Synthetic oligonucleotide"
cucaacaucaugcccguucccag

SEQ ID NO: 2008 - RNA, 21 nt, Artificial Sequence
  source: /note="Description of Artificial Sequence: Synthetic oligonucleotide"
ugggaacgggcaugauguuga

SEQ ID NO: 2009 - RNA, 23 nt, Artificial Sequence
  source: /note="Description of Artificial Sequence: Synthetic oligonucleotide"
ucaacaucaugcccguucccagg

SEQ ID NO: 2010 - RNA, 21 nt, Artificial Sequence
  source: /note="Description of Artificial Sequence: Synthetic oligonucleotide"
acuaaggugaaaagauaauga

SEQ ID NO: 2011 - RNA, 23 nt, Artificial Sequence
  source: /note="Description of Artificial Sequence: Synthetic oligonucleotide"
ucauuaucuuuucaccuuagugu

SEQ ID NO: 2012 - RNA, 21 nt, Artificial Sequence
  source: /note="Description of Artificial Sequence: Synthetic oligonucleotide"
cuaaggugaaaagauaaugau

SEQ ID NO: 2013 - RNA, 23 nt, Artificial Sequence
  source: /note="Description of Artificial Sequence: Synthetic oligonucleotide"
aucauuaucuuuucaccuuagug

SEQ ID NO: 2014 - RNA, 21 nt, Artificial Sequence
  source: /note="Description of Artificial Sequence: Synthetic oligonucleotide"
aaacacuaaggugaaaagaua

SEQ ID NO: 2015 - RNA, 23 nt, Artificial Sequence
  source: /note="Description of Artificial Sequence: Synthetic oligonucleotide"
uaucuuuucaccuuaguguuugc

SEQ ID NO: 2016 - RNA, 21 nt, Artificial Sequence
  source: /note="Description of Artificial Sequence: Synthetic oligonucleotide"
caaacacuaaggugaaaagau

SEQ ID NO: 2017 - RNA, 23 nt, Artificial Sequence
  source: /note="Description of Artificial Sequence: Synthetic oligonucleotide"
aucuuuucaccuuaguguuugcu

SEQ ID NO: 2018 - RNA, 21 nt, Artificial Sequence
  source: /note="Description of Artificial Sequence: Synthetic oligonucleotide"
agguagcacuggagagaauug

SEQ ID NO: 2019 - RNA, 23 nt, Artificial Sequence
  source: /note="Description of Artificial Sequence: Synthetic oligonucleotide"
caauucucuccagugcuaccuuc

SEQ ID NO: 2020 - RNA, 21 nt, Artificial Sequence
  source: /note="Description of Artificial Sequence: Synthetic oligonucleotide"
gguagcacuggagagaauugg

SEQ ID NO: 2021 - RNA, 23 nt, Artificial Sequence
  source: /note="Description of Artificial Sequence: Synthetic oligonucleotide"
ccaauucucuccagugcuaccuu

SEQ ID NO: 2022 - RNA, 21 nt, Artificial Sequence
  source: /note="Description of Artificial Sequence: Synthetic oligonucleotide"
gagaagguagcacuggagaga

SEQ ID NO: 2023 - RNA, 23 nt, Artificial Sequence
  source: /note="Description of Artificial Sequence: Synthetic oligonucleotide"
ucucuccagugcuaccuucucaa

SEQ ID NO: 2024 - RNA, 21 nt, Artificial Sequence
  source: /note="Description of Artificial Sequence: Synthetic oligonucleotide"
ugagaagguagcacuggagag

SEQ ID NO: 2025 - RNA, 23 nt, Artificial Sequence
  source: /note="Description of Artificial Sequence: Synthetic oligonucleotide"
cucuccagugcuaccuucucaaa

SEQ ID NO: 2026 - RNA, 21 nt, Artificial Sequence
  source: /note="Description of Artificial Sequence: Synthetic oligonucleotide"
aguggacuugcugcauaugug

SEQ ID NO: 2027 - RNA, 23 nt, Artificial Sequence
  source: /note="Description of Artificial Sequence: Synthetic oligonucleotide"
cacauaugcagcaaguccacugu

SEQ ID NO: 2028 - RNA, 21 nt, Artificial Sequence
  source: /note="Description of Artificial Sequence: Synthetic oligonucleotide"
guggacuugcugcauaugugg

SEQ ID NO: 2029 - RNA, 23 nt, Artificial Sequence
  source: /note="Description of Artificial Sequence: Synthetic oligonucleotide"
ccacauaugcagcaaguccacug

SEQ ID NO: 2030 - RNA, 21 nt, Artificial Sequence
  source: /note="Description of Artificial Sequence: Synthetic oligonucleotide"
cgacaguggacuugcugcaua

SEQ ID NO: 2031 - RNA, 23 nt, Artificial Sequence
  source: /note="Description of Artificial Sequence: Synthetic oligonucleotide"
uaugcagcaaguccacugucguc

SEQ ID NO: 2032 - RNA, 21 nt, Artificial Sequence
  source: /note="Description of Artificial Sequence: Synthetic oligonucleotide"
acgacaguggacuugcugcau

SEQ ID NO: 2033 - RNA, 23 nt, Artificial Sequence
  source: /note="Description of Artificial Sequence: Synthetic oligonucleotide"
augcagcaaguccacugucgucu

SEQ ID NO: 2034 - RNA, 21 nt, Artificial Sequence
  source: /note="Description of Artificial Sequence: Synthetic oligonucleotide"
aagguguucaagauguccucg

SEQ ID NO: 2035 - RNA, 23 nt, Artificial Sequence
  source: /note="Description of Artificial Sequence: Synthetic oligonucleotide"
cgaggacaucuugaacaccuuuc

SEQ ID NO: 2036 - RNA, 21 nt, Artificial Sequence
  source: /note="Description of Artificial Sequence: Synthetic oligonucleotide"
agguguucaagauguccucga

SEQ ID NO: 2037 - RNA, 23 nt, Artificial Sequence
  source: /note="Description of Artificial Sequence: Synthetic oligonucleotide"
ucgaggacaucuugaacaccuuu

SEQ ID NO: 2038 - RNA, 21 nt, Artificial Sequence
  source: /note="Description of Artificial Sequence: Synthetic oligonucleotide"
gagaaagguguucaagauguc

SEQ ID NO: 2039 - RNA, 23 nt, Artificial Sequence
  source: /note="Description of Artificial Sequence: Synthetic oligonucleotide"
gacaucuugaacaccuuucuccc

SEQ ID NO: 2040 - RNA, 21 nt, Artificial Sequence
  source: /note="Description of Artificial Sequence: Synthetic oligonucleotide"
ggagaaagguguucaagaugu

SEQ ID NO: 2041 - RNA, 23 nt, Artificial Sequence
  source: /note="Description of Artificial Sequence: Synthetic oligonucleotide"
acaucuugaacaccuuucucccc

SEQ ID NO: 2042 - RNA, 21 nt, Artificial Sequence
  source: /note="Description of Artificial Sequence: Synthetic oligonucleotide"
aaccgucuggaugaugugcgu

SEQ ID NO: 2043 - RNA, 23 nt, Artificial Sequence
  source: /note="Description of Artificial Sequence: Synthetic oligonucleotide"
acgcacaucauccagacgguugc

SEQ ID NO: 2044 - RNA, 21 nt, Artificial Sequence
  source: /note="Description of Artificial Sequence: Synthetic oligonucleotide"
accgucuggaugaugugcgua

SEQ ID NO: 2045 - RNA, 23 nt, Artificial Sequence
  source: /note="Description of Artificial Sequence: Synthetic oligonucleotide"
uacgcacaucauccagacgguug

SEQ ID NO: 2046 - RNA, 21 nt, Artificial Sequence
  source: /note="Description of Artificial Sequence: Synthetic oligonucleotide"
gggcaaccgucuggaugaugu

SEQ ID NO: 2047 - RNA, 23 nt, Artificial Sequence
  source: /note="Description of Artificial Sequence: Synthetic oligonucleotide"
acaucauccagacgguugcccag

SEQ ID NO: 2048 - RNA, 21 nt, Artificial Sequence
  source: /note="Description of Artificial Sequence: Synthetic oligonucleotide"
ugggcaaccgucuggaugaug

SEQ ID NO: 2049 - RNA, 23 nt, Artificial Sequence
  source: /note="Description of Artificial Sequence: Synthetic oligonucleotide"
caucauccagacgguugcccagg

SEQ ID NO: 2050 - RNA, 21 nt, Artificial Sequence
  source: /note="Description of Artificial Sequence: Synthetic oligonucleotide"
gaaacuuuggcugauaauauu

SEQ ID NO: 2051 - RNA, 23 nt, Artificial Sequence
  source: /note="Description of Artificial Sequence: Synthetic oligonucleotide"
aauauuaucagccaaaguuucuu

SEQ ID NO: 2052 - RNA, 21 nt, Artificial Sequence
  source: /note="Description of Artificial Sequence: Synthetic oligonucleotide"
aaacuuuggcugauaauauug

SEQ ID NO: 2053 - RNA, 23 nt, Artificial Sequence
  source: /note="Description of Artificial Sequence: Synthetic oligonucleotide"
caauauuaucagccaaaguuucu

SEQ ID NO: 2054 - RNA, 21 nt, Artificial Sequence
  source: /note="Description of Artificial Sequence: Synthetic oligonucleotide"
ugaagaaacuuuggcugauaa

SEQ ID NO: 2055 - RNA, 23 nt, Artificial Sequence
  source: /note="Description of Artificial Sequence: Synthetic oligonucleotide"
uuaucagccaaaguuucuucauc

SEQ ID NO: 2056 - RNA, 21 nt, Artificial Sequence
  source: /note="Description of Artificial Sequence: Synthetic oligonucleotide"
augaagaaacuuuggcugaua

SEQ ID NO: 2057 - RNA, 23 nt, Artificial Sequence
  source: /note="Description of Artificial Sequence: Synthetic oligonucleotide"
uaucagccaaaguuucuucauca

SEQ ID NO: 2058 - RNA, 21 nt, Artificial Sequence
  source: /note="Description of Artificial Sequence: Synthetic oligonucleotide"
aaagguguucaagauguccuc

SEQ ID NO: 2059 - RNA, 23 nt, Artificial Sequence
  source: /note="Description of Artificial Sequence: Synthetic oligonucleotide"
gaggacaucuugaacaccuuucu

SEQ ID NO: 2060 - RNA, 21 nt, Artificial Sequence
  source: /note="Description of Artificial Sequence: Synthetic oligonucleotide"
aagguguucaagauguccucg

SEQ ID NO: 2061 - RNA, 23 nt, Artificial Sequence
  source: /note="Description of Artificial Sequence: Synthetic oligonucleotide"
cgaggacaucuugaacaccuuuc

SEQ ID NO: 2062 - RNA, 21 nt, Artificial Sequence
  source: /note="Description of Artificial Sequence: Synthetic oligonucleotide"
ggagaaagguguucaagaugu

SEQ ID NO: 2063 - RNA, 23 nt, Artificial Sequence
  source: /note="Description of Artificial Sequence: Synthetic oligonucleotide"
acaucuugaacaccuuucucccc

SEQ ID NO: 2064 - RNA, 21 nt, Artificial Sequence
  source: /note="Description of Artificial Sequence: Synthetic oligonucleotide"
gggagaaagguguucaagaug

SEQ ID NO: 2065 - RNA, 23 nt, Artificial Sequence
  source: /note="Description of Artificial Sequence: Synthetic oligonucleotide"
caucuugaacaccuuucuccccc

SEQ ID NO: 2066 - RNA, 21 nt, Artificial Sequence
  source: /note="Description of Artificial Sequence: Synthetic oligonucleotide"
aaaucaguacuuccaaagucu

SEQ ID NO: 2067 - RNA, 23 nt, Artificial Sequence
  source: /note="Description of Artificial Sequence: Synthetic oligonucleotide"
agacuuuggaaguacugauuuag

SEQ ID NO: 2068 - RNA, 21 nt, Artificial Sequence
  source: /note="Description of Artificial Sequence: Synthetic oligonucleotide"
aaucaguacuuccaaagucua

SEQ ID NO: 2069 - RNA, 23 nt, Artificial Sequence
  source: /note="Description of Artificial Sequence: Synthetic oligonucleotide"
uagacuuuggaaguacugauuua

SEQ ID NO: 2070 - RNA, 21 nt, Artificial Sequence
  source: /note="Description of Artificial Sequence: Synthetic oligonucleotide"
ugcuaaaucaguacuuccaaa

SEQ ID NO: 2071 - RNA, 23 nt, Artificial Sequence
  source: /note="Description of Artificial Sequence: Synthetic oligonucleotide"
uuuggaaguacugauuuagcaug

SEQ ID NO: 2072 - RNA, 21 nt, Artificial Sequence
  source: /note="Description of Artificial Sequence: Synthetic oligonucleotide"
augcuaaaucaguacuuccaa

SEQ ID NO: 2073 - RNA, 23 nt, Artificial Sequence
  source: /note="Description of Artificial Sequence: Synthetic oligonucleotide"
uuggaaguacugauuuagcaugu

SEQ ID NO: 2074 - RNA, 21 nt, Artificial Sequence
  source: /note="Description of Artificial Sequence: Synthetic oligonucleotide"
acaucuuuagugucugaauau

SEQ ID NO: 2075 - RNA, 23 nt, Artificial Sequence
  source: /note="Description of Artificial Sequence: Synthetic oligonucleotide"
auauucagacacuaaagauguga

SEQ ID NO: 2076 - RNA, 21 nt, Artificial Sequence
  source: /note="Description of Artificial Sequence: Synthetic oligonucleotide"
caucuuuagugucugaauaua

SEQ ID NO: 2077 - RNA, 23 nt, Artificial Sequence
  source: /note="Description of Artificial Sequence: Synthetic oligonucleotide"
uauauucagacacuaaagaugug

SEQ ID NO: 2078 - RNA, 21 nt, Artificial Sequence
  source: /note="Description of Artificial Sequence: Synthetic oligonucleotide"
aaucacaucuuuagugucuga

SEQ ID NO: 2079 - RNA, 23 nt, Artificial Sequence
  source: /note="Description of Artificial Sequence: Synthetic oligonucleotide"
ucagacacuaaagaugugauugg

SEQ ID NO: 2080 - RNA, 21 nt, Artificial Sequence
  source: /note="Description of Artificial Sequence: Synthetic oligonucleotide"
caaucacaucuuuagugucug

SEQ ID NO: 2081 - RNA, 23 nt, Artificial Sequence
  source: /note="Description of Artificial Sequence: Synthetic oligonucleotide"
cagacacuaaagaugugauugga

SEQ ID NO: 2082 - RNA, 21 nt, Artificial Sequence
  source: /note="Description of Artificial Sequence: Synthetic oligonucleotide"
gcauguauuacuugacaaaga

SEQ ID NO: 2083 - RNA, 23 nt, Artificial Sequence
  source: /note="Description of Artificial Sequence: Synthetic oligonucleotide"
ucuuugucaaguaauacaugcug

SEQ ID NO: 2084 - RNA, 21 nt, Artificial Sequence
  source: /note="Description of Artificial Sequence: Synthetic oligonucleotide"
cauguauuacuugacaaagag

SEQ ID NO: 2085 - RNA, 23 nt, Artificial Sequence
  source: /note="Description of Artificial Sequence: Synthetic oligonucleotide"
cucuuugucaaguaauacaugcu

SEQ ID NO: 2086 - RNA, 21 nt, Artificial Sequence
  source: /note="Description of Artificial Sequence: Synthetic oligonucleotide"
uucagcauguauuacuugaca

SEQ ID NO: 2087 - RNA, 23 nt, Artificial Sequence
  source: /note="Description of Artificial Sequence: Synthetic oligonucleotide"
ugucaaguaauacaugcugaaaa

SEQ ID NO: 2088 - RNA, 21 nt, Artificial Sequence
  source: /note="Description of Artificial Sequence: Synthetic oligonucleotide"
uuucagcauguauuacuugac

SEQ ID NO: 2089 - RNA, 23 nt, Artificial Sequence
  source: /note="Description of Artificial Sequence: Synthetic oligonucleotide"
gucaaguaauacaugcugaaaaa

SEQ ID NO: 2090 - RNA, 21 nt, Artificial Sequence
  source: /note="Description of Artificial Sequence: Synthetic oligonucleotide"
auguuacuucuuagagagaaa

SEQ ID NO: 2091 - RNA, 23 nt, Artificial Sequence
  source: /note="Description of Artificial Sequence: Synthetic oligonucleotide"
uuucucucuaagaaguaacauac

SEQ ID NO: 2092 - RNA, 21 nt, Artificial Sequence
  source: /note="Description of Artificial Sequence: Synthetic oligonucleotide"
uguuacuucuuagagagaaau

SEQ ID NO: 2093 - RNA, 23 nt, Artificial Sequence
  source: /note="Description of Artificial Sequence: Synthetic oligonucleotide"
auuucucucuaagaaguaacaua

SEQ ID NO: 2094 - RNA, 21 nt, Artificial Sequence
  source: /note="Description of Artificial Sequence: Synthetic oligonucleotide"
auguauguuacuucuuagaga

SEQ ID NO: 2095 - RNA, 23 nt, Artificial Sequence
  source: /note="Description of Artificial Sequence: Synthetic oligonucleotide"
ucucuaagaaguaacauacaucc

SEQ ID NO: 2096 - RNA, 21 nt, Artificial Sequence
  source: /note="Description of Artificial Sequence: Synthetic oligonucleotide"
gauguauguuacuucuuagag

SEQ ID NO: 2097 - RNA, 23 nt, Artificial Sequence
  source: /note="Description of Artificial Sequence: Synthetic oligonucleotide"
cucuaagaaguaacauacauccu

SEQ ID NO: 2098 - RNA, 21 nt, Artificial Sequence
  source: /note="Description of Artificial Sequence: Synthetic oligonucleotide"
acaacuuugagaagguagcac

SEQ ID NO: 2099 - RNA, 23 nt, Artificial Sequence
  source: /note="Description of Artificial Sequence: Synthetic oligonucleotide"
gugcuaccuucucaaaguuguga

SEQ ID NO: 2100 - RNA, 21 nt, Artificial Sequence
  source: /note="Description of Artificial Sequence: Synthetic oligonucleotide"
caacuuugagaagguagcacu

SEQ ID NO: 2101 - RNA, 23 nt, Artificial Sequence
  source: /note="Description of Artificial Sequence: Synthetic oligonucleotide"
agugcuaccuucucaaaguugug

SEQ ID NO: 2102 - RNA, 21 nt, Artificial Sequence
  source: /note="Description of Artificial Sequence: Synthetic oligonucleotide"
auucacaacuuugagaaggua

SEQ ID NO: 2103 - RNA, 23 nt, Artificial Sequence
  source: /note="Description of Artificial Sequence: Synthetic oligonucleotide"
uaccuucucaaaguugugaauca

SEQ ID NO: 2104 - RNA, 21 nt, Artificial Sequence
  source: /note="Description of Artificial Sequence: Synthetic oligonucleotide"
gauucacaacuuugagaaggu

SEQ ID NO: 2105 - RNA, 23 nt, Artificial Sequence
  source: /note="Description of Artificial Sequence: Synthetic oligonucleotide"
accuucucaaaguugugaaucag

SEQ ID NO: 2106 - RNA, 21 nt, Artificial Sequence
  source: /note="Description of Artificial Sequence: Synthetic oligonucleotide"
aacaugcuaaaucaguacuuc

SEQ ID NO: 2107 - RNA, 23 nt, Artificial Sequence
  source: /note="Description of Artificial Sequence: Synthetic oligonucleotide"
gaaguacugauuuagcauguugu

SEQ ID NO: 2108 - RNA, 21 nt, Artificial Sequence
  source: /note="Description of Artificial Sequence: Synthetic oligonucleotide"
acaugcuaaaucaguacuucc

SEQ ID NO: 2109 - RNA, 23 nt, Artificial Sequence
  source: /note="Description of Artificial Sequence: Synthetic oligonucleotide"
ggaaguacugauuuagcauguug

SEQ ID NO: 2110 - RNA, 21 nt, Artificial Sequence
  source: /note="Description of Artificial Sequence: Synthetic oligonucleotide"
gaacaacaugcuaaaucagua

SEQ ID NO: 2111 - RNA, 23 nt, Artificial Sequence
  source: /note="Description of Artificial Sequence: Synthetic oligonucleotide"
uacugauuuagcauguuguucau

SEQ ID NO: 2112 - RNA, 21 nt, Artificial Sequence
  source: /note="Description of Artificial Sequence: Synthetic oligonucleotide"
ugaacaacaugcuaaaucagu

SEQ ID NO: 2113 - RNA, 23 nt, Artificial Sequence
  source: /note="Description of Artificial Sequence: Synthetic oligonucleotide"
acugauuuagcauguuguucaua

SEQ ID NO: 2114 - RNA, 21 nt, Artificial Sequence
  source: /note="Description of Artificial Sequence: Synthetic oligonucleotide"
aaaccaguacuuuaucauuuu

SEQ ID NO: 2115 - RNA, 23 nt, Artificial Sequence
  source: /note="Description of Artificial Sequence: Synthetic oligonucleotide"
aaaaugauaaaguacugguuuca

SEQ ID NO: 2116 - RNA, 21 nt, Artificial Sequence
  source: /note="Description of Artificial Sequence: Synthetic oligonucleotide"
aaccaguacuuuaucauuuuc

SEQ ID NO: 2117 - RNA, 23 nt, Artificial Sequence
  source: /note="Description of Artificial Sequence: Synthetic oligonucleotide"
gaaaaugauaaaguacugguuuc

SEQ ID NO: 2118 - RNA, 21 nt, Artificial Sequence
  source: /note="Description of Artificial Sequence: Synthetic oligonucleotide"
uuugaaaccaguacuuuauca

SEQ ID NO: 2119 - RNA, 23 nt, Artificial Sequence
  source: /note="Description of Artificial Sequence: Synthetic oligonucleotide"
ugauaaaguacugguuucaaaau

SEQ ID NO: 2120 - RNA, 21 nt, Artificial Sequence
  source: /note="Description of Artificial Sequence: Synthetic oligonucleotide"
uuuugaaaccaguacuuuauc

SEQ ID NO: 2121 - RNA, 23 nt, Artificial Sequence
  source: /note="Description of Artificial Sequence: Synthetic oligonucleotide"
gauaaaguacugguuucaaaauu

SEQ ID NO: 2122 - RNA, 21 nt, Artificial Sequence
  source: /note="Description of Artificial Sequence: Synthetic oligonucleotide"
gagaagaugggcuacaaggcc

SEQ ID NO: 2123 - RNA, 23 nt, Artificial Sequence
  source: /note="Description of Artificial Sequence: Synthetic oligonucleotide"
ggccuuguagcccaucuucucug

SEQ ID NO: 2124 - RNA, 21 nt, Artificial Sequence
  source: /note="Description of Artificial Sequence: Synthetic oligonucleotide"
agaagaugggcuacaaggcca

SEQ ID NO: 2125 - RNA, 23 nt, Artificial Sequence
  source: /note="Description of Artificial Sequence: Synthetic oligonucleotide"
uggccuuguagcccaucuucucu

SEQ ID NO: 2126 - RNA, 21 nt, Artificial Sequence
  source: /note="Description of Artificial Sequence: Synthetic oligonucleotide"
ggcagagaagaugggcuacaa

SEQ ID NO: 2127 - RNA, 23 nt, Artificial Sequence
  source: /note="Description of Artificial Sequence: Synthetic oligonucleotide"
uuguagcccaucuucucugccug

SEQ ID NO: 2128 - RNA, 21 nt, Artificial Sequence
  source: /note="Description of Artificial Sequence: Synthetic oligonucleotide"
aggcagagaagaugggcuaca

SEQ ID NO: 2129 - RNA, 23 nt, Artificial Sequence
  source: /note="Description of Artificial Sequence: Synthetic oligonucleotide"
uguagcccaucuucucugccugc

SEQ ID NO: 2130 - RNA, 21 nt, Artificial Sequence
  source: /note="Description of Artificial Sequence: Synthetic oligonucleotide"
aacgggcaugauguugaguuc

SEQ ID NO: 2131 - RNA, 23 nt, Artificial Sequence
  source: /note="Description of Artificial Sequence: Synthetic oligonucleotide"
gaacucaacaucaugcccguucc

SEQ ID NO: 2132 - RNA, 21 nt, Artificial Sequence
  source: /note="Description of Artificial Sequence: Synthetic oligonucleotide"
acgggcaugauguugaguucc

SEQ ID NO: 2133 - RNA, 23 nt, Artificial Sequence
  source: /note="Description of Artificial Sequence: Synthetic oligonucleotide"
ggaacucaacaucaugcccguuc

SEQ ID NO: 2134 - RNA, 21 nt, Artificial Sequence
  source: /note="Description of Artificial Sequence: Synthetic oligonucleotide"
ugggaacgggcaugauguuga

SEQ ID NO: 2135 - RNA, 23 nt, Artificial Sequence
  source: /note="Description of Artificial Sequence: Synthetic oligonucleotide"
ucaacaucaugcccguucccagg

SEQ ID NO: 2136 - RNA, 21 nt, Artificial Sequence
  source: /note="Description of Artificial Sequence: Synthetic oligonucleotide"
cugggaacgggcaugauguug

SEQ ID NO: 2137 - RNA, 23 nt, Artificial Sequence
  source: /note="Description of Artificial Sequence: Synthetic oligonucleotide"
caacaucaugcccguucccaggg

SEQ ID NO: 2138 - RNA, 21 nt, Artificial Sequence
  source: /note="Description of Artificial Sequence: Synthetic oligonucleotide"
auguggcuaaagcaauagacc

SEQ ID NO: 2139 - RNA, 23 nt, Artificial Sequence
  source: /note="Description of Artificial Sequence: Synthetic oligonucleotide"
ggucuauugcuuuagccacauau

SEQ ID NO: 2140 - RNA, 21 nt, Artificial Sequence
  source: /note="Description of Artificial Sequence: Synthetic oligonucleotide"
uguggcuaaagcaauagaccc

SEQ ID NO: 2141 - RNA, 23 nt, Artificial Sequence
  source: /note="Description of Artificial Sequence: Synthetic oligonucleotide"
gggucuauugcuuuagccacaua

SEQ ID NO: 2142 - RNA, 21 nt, Artificial Sequence
  source: /note="Description of Artificial Sequence: Synthetic oligonucleotide"
gcauauguggcuaaagcaaua

SEQ ID NO: 2143 - RNA, 23 nt, Artificial Sequence
  source: /note="Description of Artificial Sequence: Synthetic oligonucleotide"
uauugcuuuagccacauaugcag

SEQ ID NO: 2144 - RNA, 21 nt, Artificial Sequence
  source: /note="Description of Artificial Sequence: Synthetic oligonucleotide"
ugcauauguggcuaaagcaau

SEQ ID NO: 2145 - RNA, 23 nt, Artificial Sequence
  source: /note="Description of Artificial Sequence: Synthetic oligonucleotide"
auugcuuuagccacauaugcagc

SEQ ID NO: 2146 - RNA, 21 nt, Artificial Sequence
  source: /note="Description of Artificial Sequence: Synthetic oligonucleotide"
aggaugcuccggaauguugcu

SEQ ID NO: 2147 - RNA, 23 nt, Artificial Sequence
  source: /note="Description of Artificial Sequence: Synthetic oligonucleotide"
agcaacauuccggagcauccuug

SEQ ID NO: 2148 - RNA, 21 nt, Artificial Sequence
  source: /note="Description of Artificial Sequence: Synthetic oligonucleotide"
ggaugcuccggaauguugcug

SEQ ID NO: 2149 - RNA, 23 nt, Artificial Sequence
  source: /note="Description of Artificial Sequence: Synthetic oligonucleotide"
cagcaacauuccggagcauccuu

SEQ ID NO: 2150 - RNA, 21 nt, Artificial Sequence
  source: /note="Description of Artificial Sequence: Synthetic oligonucleotide"
uccaaggaugcuccggaaugu

SEQ ID NO: 2151 - RNA, 23 nt, Artificial Sequence
  source: /note="Description of Artificial Sequence: Synthetic oligonucleotide"
acauuccggagcauccuuggaua

SEQ ID NO: 2152 - RNA, 21 nt, Artificial Sequence
  source: /note="Description of Artificial Sequence: Synthetic oligonucleotide"
auccaaggaugcuccggaaug

SEQ ID NO: 2153 - RNA, 23 nt, Artificial Sequence
  source: /note="Description of Artificial Sequence: Synthetic oligonucleotide"
cauuccggagcauccuuggauac

SEQ ID NO: 2154 - RNA, 21 nt, Artificial Sequence
  source: /note="Description of Artificial Sequence: Synthetic oligonucleotide"
ucacaucuuuagugucugaau

SEQ ID NO: 2155 - RNA, 23 nt, Artificial Sequence
  source: /note="Description of Artificial Sequence: Synthetic oligonucleotide"
auucagacacuaaagaugugauu

SEQ ID NO: 2156 - RNA, 21 nt, Artificial Sequence
  source: /note="Description of Artificial Sequence: Synthetic oligonucleotide"
cacaucuuuagugucugaaua

SEQ ID NO: 2157 - RNA, 23 nt, Artificial Sequence
  source: /note="Description of Artificial Sequence: Synthetic oligonucleotide"
uauucagacacuaaagaugugau

SEQ ID NO: 2158 - RNA, 21 nt, Artificial Sequence
  source: /note="Description of Artificial Sequence: Synthetic oligonucleotide"
ccaaucacaucuuuagugucu

SEQ ID NO: 2159 - RNA, 23 nt, Artificial Sequence
  source: /note="Description of Artificial Sequence: Synthetic oligonucleotide"
agacacuaaagaugugauuggaa

SEQ ID NO: 2160 - RNA, 21 nt, Artificial Sequence
  source: /note="Description of Artificial Sequence: Synthetic oligonucleotide"
uccaaucacaucuuuaguguc

SEQ ID NO: 2161 - RNA, 23 nt, Artificial Sequence
  source: /note="Description of Artificial Sequence: Synthetic oligonucleotide"
gacacuaaagaugugauuggaaa

SEQ ID NO: 2162 - RNA, 21 nt, Artificial Sequence
  source: /note="Description of Artificial Sequence: Synthetic oligonucleotide"
aaauguguuuagacaacguca

SEQ ID NO: 2163 - RNA, 23 nt, Artificial Sequence
  source: /note="Description of Artificial Sequence: Synthetic oligonucleotide"
ugacguugucuaaacacauuuuc

SEQ ID NO: 2164 - RNA, 21 nt, Artificial Sequence
  source: /note="Description of Artificial Sequence: Synthetic oligonucleotide"
aauguguuuagacaacgucau

SEQ ID NO: 2165 - RNA, 23 nt, Artificial Sequence
  source: /note="Description of Artificial Sequence: Synthetic oligonucleotide"
augacguugucuaaacacauuuu

SEQ ID NO: 2166 - RNA, 21 nt, Artificial Sequence
  source: /note="Description of Artificial Sequence: Synthetic oligonucleotide"
uugaaaauguguuuagacaac

SEQ ID NO: 2167 - RNA, 23 nt, Artificial Sequence
  source: /note="Description of Artificial Sequence: Synthetic oligonucleotide"
guugucuaaacacauuuucaaug

SEQ ID NO: 2168 - RNA, 21 nt, Artificial Sequence
  source: /note="Description of Artificial Sequence: Synthetic oligonucleotide"
auugaaaauguguuuagacaa

SEQ ID NO: 2169 - RNA, 23 nt, Artificial Sequence
  source: /note="Description of Artificial Sequence: Synthetic oligonucleotide"
uugucuaaacacauuuucaaugu

SEQ ID NO: 2170 - RNA, 21 nt, Artificial Sequence
  source: /note="Description of Artificial Sequence: Synthetic oligonucleotide"
uacuaaaggaagaauuccggu

SEQ ID NO: 2171 - RNA, 23 nt, Artificial Sequence
  source: /note="Description of Artificial Sequence: Synthetic oligonucleotide"
accggaauucuuccuuuaguauc

SEQ ID NO: 2172 - RNA, 21 nt, Artificial Sequence
  source: /note="Description of Artificial Sequence: Synthetic oligonucleotide"
acuaaaggaagaauuccgguu

SEQ ID NO: 2173 - RNA, 23 nt, Artificial Sequence
  source: /note="Description of Artificial Sequence: Synthetic oligonucleotide"
aaccggaauucuuccuuuaguau

SEQ ID NO: 2174 - RNA, 21 nt, Artificial Sequence
  source: /note="Description of Artificial Sequence: Synthetic oligonucleotide"
gagauacuaaaggaagaauuc

SEQ ID NO: 2175 - RNA, 23 nt, Artificial Sequence
  source: /note="Description of Artificial Sequence: Synthetic oligonucleotide"
gaauucuuccuuuaguaucucga

SEQ ID NO: 2176 - RNA, 21 nt, Artificial Sequence
  source: /note="Description of Artificial Sequence: Synthetic oligonucleotide"
cgagauacuaaaggaagaauu

SEQ ID NO: 2177 - RNA, 23 nt, Artificial Sequence
  source: /note="Description of Artificial Sequence: Synthetic oligonucleotide"
aauucuuccuuuaguaucucgag

SEQ ID NO: 2178 - RNA, 21 nt, Artificial Sequence
  source: /note="Description of Artificial Sequence: Synthetic oligonucleotide"
aacuuuggcugauaauauugc

SEQ ID NO: 2179 - RNA, 23 nt, Artificial Sequence
  source: /note="Description of Artificial Sequence: Synthetic oligonucleotide"
gcaauauuaucagccaaaguuuc

SEQ ID NO: 2180 - RNA, 21 nt, Artificial Sequence
  source: /note="Description of Artificial Sequence: Synthetic oligonucleotide"
acuuuggcugauaauauugca

SEQ ID NO: 2181 - RNA, 23 nt, Artificial Sequence
  source: /note="Description of Artificial Sequence: Synthetic oligonucleotide"
ugcaauauuaucagccaaaguuu

SEQ ID NO: 2182 - RNA, 21 nt, Artificial Sequence
  source: /note="Description of Artificial Sequence: Synthetic oligonucleotide"
aagaaacuuuggcugauaaua

SEQ ID NO: 2183 - RNA, 23 nt, Artificial Sequence
  source: /note="Description of Artificial Sequence: Synthetic oligonucleotide"
uauuaucagccaaaguuucuuca

SEQ ID NO: 2184 - RNA, 21 nt, Artificial Sequence
  source: /note="Description of Artificial Sequence: Synthetic oligonucleotide"
gaagaaacuuuggcugauaau

SEQ ID NO: 2185 - RNA, 23 nt, Artificial Sequence
  source: /note="Description of Artificial Sequence: Synthetic oligonucleotide"
auuaucagccaaaguuucuucau

SEQ ID NO: 2186 - RNA, 21 nt, Artificial Sequence
  source: /note="Description of Artificial Sequence: Synthetic oligonucleotide"
aaauggcugagaagacugaca

SEQ ID NO: 2187 - RNA, 23 nt, Artificial Sequence
  source: /note="Description of Artificial Sequence: Synthetic oligonucleotide"
ugucagucuucucagccauuuga

SEQ ID NO: 2188 - RNA, 21 nt, Artificial Sequence
  source: /note="Description of Artificial Sequence: Synthetic oligonucleotide"
aauggcugagaagacugacau

SEQ ID NO: 2189 - RNA, 23 nt, Artificial Sequence
  source: /note="Description of Artificial Sequence: Synthetic oligonucleotide"
augucagucuucucagccauuug

SEQ ID NO: 2190 - RNA, 21 nt, Artificial Sequence
  source: /note="Description of Artificial Sequence: Synthetic oligonucleotide"
uaucaaauggcugagaagacu

SEQ ID NO: 2191 - RNA, 23 nt, Artificial Sequence
  source: /note="Description of Artificial Sequence: Synthetic oligonucleotide"
agucuucucagccauuugauauc

SEQ ID NO: 2192 - RNA, 21 nt, Artificial Sequence
  source: /note="Description of Artificial Sequence: Synthetic oligonucleotide"
auaucaaauggcugagaagac

SEQ ID NO: 2193 - RNA, 23 nt, Artificial Sequence
  source: /note="Description of Artificial Sequence: Synthetic oligonucleotide"
gucuucucagccauuugauaucu

SEQ ID NO: 2194 - RNA, 21 nt, Artificial Sequence
  source: /note="Description of Artificial Sequence: Synthetic oligonucleotide"
gugguucuuaaauuguaagcu

SEQ ID NO: 2195 - RNA, 23 nt, Artificial Sequence
  source: /note="Description of Artificial Sequence: Synthetic oligonucleotide"
agcuuacaauuuaagaaccacug

SEQ ID NO: 2196 - RNA, 21 nt, Artificial Sequence
  source: /note="Description of Artificial Sequence: Synthetic oligonucleotide"
ugguucuuaaauuguaagcuc

SEQ ID NO: 2197 - RNA, 23 nt, Artificial Sequence
  source: /note="Description of Artificial Sequence: Synthetic oligonucleotide"
gagcuuacaauuuaagaaccacu

SEQ ID NO: 2198 - RNA, 21 nt, Artificial Sequence
  source: /note="Description of Artificial Sequence: Synthetic oligonucleotide"
aacagugguucuuaaauugua

SEQ ID NO: 2199 - RNA, 23 nt, Artificial Sequence
  source: /note="Description of Artificial Sequence: Synthetic oligonucleotide"
uacaauuuaagaaccacuguuuu

SEQ ID NO: 2200 - RNA, 21 nt, Artificial Sequence
  source: /note="Description of Artificial Sequence: Synthetic oligonucleotide"
aaacagugguucuuaaauugu

SEQ ID NO: 2201 - RNA, 23 nt, Artificial Sequence
  source: /note="Description of Artificial Sequence: Synthetic oligonucleotide"
acaauuuaagaaccacuguuuua

SEQ ID NO: 2202 - RNA, 21 nt, Artificial Sequence
  source: /note="Description of Artificial Sequence: Synthetic oligonucleotide"
aagucaucgacaagacauugg

SEQ ID NO: 2203 - RNA, 23 nt, Artificial Sequence
  source: /note="Description of Artificial Sequence: Synthetic oligonucleotide"
ccaaugucuugucgaugacuuuc

SEQ ID NO: 2204 - RNA, 21 nt, Artificial Sequence
  source: /note="Description of Artificial Sequence: Synthetic oligonucleotide"
agucaucgacaagacauuggu

SEQ ID NO: 2205 - RNA, 23 nt, Artificial Sequence
  source: /note="Description of Artificial Sequence: Synthetic oligonucleotide"
accaaugucuugucgaugacuuu

SEQ ID NO: 2206 - RNA, 21 nt, Artificial Sequence
  source: /note="Description of Artificial Sequence: Synthetic oligonucleotide"
gugaaagucaucgacaagaca

SEQ ID NO: 2207 - RNA, 23 nt, Artificial Sequence
  source: /note="Description of Artificial Sequence: Synthetic oligonucleotide"
ugucuugucgaugacuuucacau

SEQ ID NO: 2208 - RNA, 21 nt, Artificial Sequence
  source: /note="Description of Artificial Sequence: Synthetic oligonucleotide"
ugugaaagucaucgacaagac

SEQ ID NO: 2209 - RNA, 23 nt, Artificial Sequence
  source: /note="Description of Artificial Sequence: Synthetic oligonucleotide"
gucuugucgaugacuuucacauu

SEQ ID NO: 2210 - RNA, 21 nt, Artificial Sequence
  source: /note="Description of Artificial Sequence: Synthetic oligonucleotide"
gauaauauugcagcauuuucc

SEQ ID NO: 2211 - RNA, 23 nt, Artificial Sequence
  source: /note="Description of Artificial Sequence: Synthetic oligonucleotide"
ggaaaaugcugcaauauuaucag

SEQ ID NO: 2212 - RNA, 21 nt, Artificial Sequence
  source: /note="Description of Artificial Sequence: Synthetic oligonucleotide"
auaauauugcagcauuuucca

SEQ ID NO: 2213 - RNA, 23 nt, Artificial Sequence
  source: /note="Description of Artificial Sequence: Synthetic oligonucleotide"
uggaaaaugcugcaauauuauca

SEQ ID NO: 2214 - RNA, 21 nt, Artificial Sequence
  source: /note="Description of Artificial Sequence: Synthetic oligonucleotide"
ggcugauaauauugcagcauu

SEQ ID NO: 2215 - RNA, 23 nt, Artificial Sequence
  source: /note="Description of Artificial Sequence: Synthetic oligonucleotide"
aaugcugcaauauuaucagccaa

SEQ ID NO: 2216 - RNA, 21 nt, Artificial Sequence
  source: /note="Description of Artificial Sequence: Synthetic oligonucleotide"
uggcugauaauauugcagcau

SEQ ID NO: 2217 - RNA, 23 nt, Artificial Sequence
  source: /note="Description of Artificial Sequence: Synthetic oligonucleotide"
augcugcaauauuaucagccaaa

SEQ ID NO: 2218 - RNA, 21 nt, Artificial Sequence
  source: /note="Description of Artificial Sequence: Synthetic oligonucleotide"
gcuaauuuguaucaaugauua

SEQ ID NO: 2219 - RNA, 23 nt, Artificial Sequence
  source: /note="Description of Artificial Sequence: Synthetic oligonucleotide"
uaaucauugauacaaauuagccg

SEQ ID NO: 2220 - RNA, 21 nt, Artificial Sequence
  source: /note="Description of Artificial Sequence: Synthetic oligonucleotide"
cuaauuuguaucaaugauuau

SEQ ID NO: 2221 - RNA, 23 nt, Artificial Sequence
  source: /note="Description of Artificial Sequence: Synthetic oligonucleotide"
auaaucauugauacaaauuagcc

SEQ ID NO: 2222 - RNA, 21 nt, Artificial Sequence
  source: /note="Description of Artificial Sequence: Synthetic oligonucleotide"
cccggcuaauuuguaucaaug

SEQ ID NO: 2223 - RNA, 23 nt, Artificial Sequence
  source: /note="Description of Artificial Sequence: Synthetic oligonucleotide"
cauugauacaaauuagccggggg

SEQ ID NO: 2224 - RNA, 21 nt, Artificial Sequence
  source: /note="Description of Artificial Sequence: Synthetic oligonucleotide"
ccccggcuaauuuguaucaau

SEQ ID NO: 2225 - RNA, 23 nt, Artificial Sequence
  source: /note="Description of Artificial Sequence: Synthetic oligonucleotide"
auugauacaaauuagccggggga

SEQ ID NO: 2226 - RNA, 21 nt, Artificial Sequence
  source: /note="Description of Artificial Sequence: Synthetic oligonucleotide"
uaauuggugauacuucuuuga

SEQ ID NO: 2227 - RNA, 23 nt, Artificial Sequence
  source: /note="Description of Artificial Sequence: Synthetic oligonucleotide"
ucaaagaaguaucaccaauuacc

SEQ ID NO: 2228 - RNA, 21 nt, Artificial Sequence
  source: /note="Description of Artificial Sequence: Synthetic oligonucleotide"
aauuggugauacuucuuugaa

SEQ ID NO: 2229 - RNA, 23 nt, Artificial Sequence
  source: /note="Description of Artificial Sequence: Synthetic oligonucleotide"
uucaaagaaguaucaccaauuac

SEQ ID NO: 2230 - RNA, 21 nt, Artificial Sequence
  source: /note="Description of Artificial Sequence: Synthetic oligonucleotide"
gcgguaauuggugauacuucu

SEQ ID NO: 2231 - RNA, 23 nt, Artificial Sequence
  source: /note="Description of Artificial Sequence: Synthetic oligonucleotide"
agaaguaucaccaauuaccgcca

SEQ ID NO: 2232 - RNA, 21 nt, Artificial Sequence
  source: /note="Description of Artificial Sequence: Synthetic oligonucleotide"
ggcgguaauuggugauacuuc

SEQ ID NO: 2233 - RNA, 23 nt, Artificial Sequence
  source: /note="Description of Artificial Sequence: Synthetic oligonucleotide"
gaaguaucaccaauuaccgccac

SEQ ID NO: 2234 - RNA, 21 nt, Artificial Sequence
  source: /note="Description of Artificial Sequence: Synthetic oligonucleotide"
cagugguucuuaaauuguaag

SEQ ID NO: 2235 - RNA, 23 nt, Artificial Sequence
  source: /note="Description of Artificial Sequence: Synthetic oligonucleotide"
cuuacaauuuaagaaccacuguu

SEQ ID NO: 2236 - RNA, 21 nt, Artificial Sequence
  source: /note="Description of Artificial Sequence: Synthetic oligonucleotide"
agugguucuuaaauuguaagc

SEQ ID NO: 2237 - RNA, 23 nt, Artificial Sequence
  source: /note="Description of Artificial Sequence: Synthetic oligonucleotide"
gcuuacaauuuaagaaccacugu

SEQ ID NO: 2238 - RNA, 21 nt, Artificial Sequence
  source: /note="Description of Artificial Sequence: Synthetic oligonucleotide"
aaaacagugguucuuaaauug

SEQ ID NO: 2239 - RNA, 23 nt, Artificial Sequence
  source: /note="Description of Artificial Sequence: Synthetic oligonucleotide"
caauuuaagaaccacuguuuuaa

SEQ ID NO: 2240 - RNA, 21 nt, Artificial Sequence
  source: /note="Description of Artificial Sequence: Synthetic oligonucleotide"
uaaaacagugguucuuaaauu

SEQ ID NO: 2241 - RNA, 23 nt, Artificial Sequence
  source: /note="Description of Artificial Sequence: Synthetic oligonucleotide"
aauuuaagaaccacuguuuuaaa

SEQ ID NO: 2242 - RNA, 21 nt, Artificial Sequence
  source: /note="Description of Artificial Sequence: Synthetic oligonucleotide"
accuguauucuguuuacaugu

SEQ ID NO: 2243 - RNA, 23 nt, Artificial Sequence
  source: /note="Description of Artificial Sequence: Synthetic oligonucleotide"
acauguaaacagaauacagguua

SEQ ID NO: 2244 - RNA, 21 nt, Artificial Sequence
  source: /note="Description of Artificial Sequence: Synthetic oligonucleotide"
ccuguauucuguuuacauguc

SEQ ID NO: 2245 - RNA, 23 nt, Artificial Sequence
  source: /note="Description of Artificial Sequence: Synthetic oligonucleotide"
gacauguaaacagaauacagguu

SEQ ID NO: 2246 - RNA, 21 nt, Artificial Sequence
  source: /note="Description of Artificial Sequence: Synthetic oligonucleotide"
auuaaccuguauucuguuuac

SEQ ID NO: 2247 - RNA, 23 nt, Artificial Sequence
  source: /note="Description of Artificial Sequence: Synthetic oligonucleotide"
guaaacagaauacagguuaauaa

SEQ ID NO: 2248 - RNA, 21 nt, Artificial Sequence
  source: /note="Description of Artificial Sequence: Synthetic oligonucleotide"
uauuaaccuguauucuguuua

SEQ ID NO: 2249 - RNA, 23 nt, Artificial Sequence
  source: /note="Description of Artificial Sequence: Synthetic oligonucleotide"
uaaacagaauacagguuaauaaa

SEQ ID NO: 2250 - RNA, 21 nt, Artificial Sequence
  source: /note="Description of Artificial Sequence: Synthetic oligonucleotide"
aagaaacuuuggcugauaaua

SEQ ID NO: 2251 - RNA, 23 nt, Artificial Sequence
  source: /note="Description of Artificial Sequence: Synthetic oligonucleotide"
uauuaucagccaaaguuucuuca

SEQ ID NO: 2252 - RNA, 21 nt, Artificial Sequence
  source: /note="Description of Artificial Sequence: Synthetic oligonucleotide"
agaaacuuuggcugauaauau

SEQ ID NO: 2253 - RNA, 23 nt, Artificial Sequence
  source: /note="Description of Artificial Sequence: Synthetic oligonucleotide"
auauuaucagccaaaguuucuuc

SEQ ID NO: 2254 - RNA, 21 nt, Artificial Sequence
  source: /note="Description of Artificial Sequence: Synthetic oligonucleotide"
gaugaagaaacuuuggcugau

SEQ ID NO: 2255 - RNA, 23 nt, Artificial Sequence
  source: /note="Description of Artificial Sequence: Synthetic oligonucleotide"
aucagccaaaguuucuucaucau

SEQ ID NO: 2256 - RNA, 21 nt, Artificial Sequence
  source: /note="Description of Artificial Sequence: Synthetic oligonucleotide"
ugaugaagaaacuuuggcuga

SEQ ID NO: 2257 - RNA, 23 nt, Artificial Sequence
  source: /note="Description of Artificial Sequence: Synthetic oligonucleotide"
ucagccaaaguuucuucaucauu

SEQ ID NO: 2258 - RNA, 21 nt, Artificial Sequence
  source: /note="Description of Artificial Sequence: Synthetic oligonucleotide"
gaaagguguucaagauguccu

SEQ ID NO: 2259 - RNA, 23 nt, Artificial Sequence
  source: /note="Description of Artificial Sequence: Synthetic oligonucleotide"
aggacaucuugaacaccuuucuc

SEQ ID NO: 2260 - RNA, 21 nt, Artificial Sequence
  source: /note="Description of Artificial Sequence: Synthetic oligonucleotide"
aaagguguucaagauguccuc

SEQ ID NO: 2261 - RNA, 23 nt, Artificial Sequence
  source: /note="Description of Artificial Sequence: Synthetic oligonucleotide"
gaggacaucuugaacaccuuucu

SEQ ID NO: 2262 - RNA, 21 nt, Artificial Sequence
  source: /note="Description of Artificial Sequence: Synthetic oligonucleotide"
gggagaaagguguucaagaug

SEQ ID NO: 2263 - RNA, 23 nt, Artificial Sequence
  source: /note="Description of Artificial Sequence: Synthetic oligonucleotide"
caucuugaacaccuuucuccccc

SEQ ID NO: 2264 - RNA, 21 nt, Artificial Sequence
  source: /note="Description of Artificial Sequence: Synthetic oligonucleotide"
ggggagaaagguguucaagau

SEQ ID NO: 2265 - RNA, 23 nt, Artificial Sequence
  source: /note="Description of Artificial Sequence: Synthetic oligonucleotide"
aucuugaacaccuuucucccccu

SEQ ID NO: 2266 - RNA, 21 nt, Artificial Sequence
  source: /note="Description of Artificial Sequence: Synthetic oligonucleotide"
aucuuggugucgaaucauggg

SEQ ID NO: 2267 - RNA, 23 nt, Artificial Sequence
  source: /note="Description of Artificial Sequence: Synthetic oligonucleotide"
cccaugauucgacaccaagaucc

SEQ ID NO: 2268 - RNA, 21 nt, Artificial Sequence
  source: /note="Description of Artificial Sequence: Synthetic oligonucleotide"
ucuuggugucgaaucaugggg

SEQ ID NO: 2269 - RNA, 23 nt, Artificial Sequence
  source: /note="Description of Artificial Sequence: Synthetic oligonucleotide"
ccccaugauucgacaccaagauc

SEQ ID NO: 2270 - RNA, 21 nt, Artificial Sequence
  source: /note="Description of Artificial Sequence: Synthetic oligonucleotide"
ugggaucuuggugucgaauca

SEQ ID NO: 2271 - RNA, 23 nt, Artificial Sequence
  source: /note="Description of Artificial Sequence: Synthetic oligonucleotide"
ugauucgacaccaagaucccauu

SEQ ID NO: 2272 - RNA, 21 nt, Artificial Sequence
  source: /note="Description of Artificial Sequence: Synthetic oligonucleotide"
augggaucuuggugucgaauc

SEQ ID NO: 2273 - RNA, 23 nt, Artificial Sequence
  source: /note="Description of Artificial Sequence: Synthetic oligonucleotide"
gauucgacaccaagaucccauuc

SEQ ID NO: 2274 - RNA, 21 nt, Artificial Sequence
  source: /note="Description of Artificial Sequence: Synthetic oligonucleotide"
gcuacaaggccauauuuguga

SEQ ID NO: 2275 - RNA, 23 nt, Artificial Sequence
  source: /note="Description of Artificial Sequence: Synthetic oligonucleotide"
ucacaaauauggccuuguagccc

SEQ ID NO: 2276 - RNA, 21 nt, Artificial Sequence
  source: /note="Description of Artificial Sequence: Synthetic oligonucleotide"
cuacaaggccauauuugugac

SEQ ID NO: 2277 - RNA, 23 nt, Artificial Sequence
  source: /note="Description of Artificial Sequence: Synthetic oligonucleotide"
gucacaaauauggccuuguagcc

SEQ ID NO: 2278 - RNA, 21 nt, Artificial Sequence
  source: /note="Description of Artificial Sequence: Synthetic oligonucleotide"
augggcuacaaggccauauuu

SEQ ID NO: 2279 - RNA, 23 nt, Artificial Sequence
  source: /note="Description of Artificial Sequence: Synthetic oligonucleotide"
aaauauggccuuguagcccaucu

SEQ ID NO: 2280 - RNA, 21 nt, Artificial Sequence
  source: /note="Description of Artificial Sequence: Synthetic oligonucleotide"
gaugggcuacaaggccauauu

SEQ ID NO: 2281 - RNA, 23 nt, Artificial Sequence
  source: /note="Description of Artificial Sequence: Synthetic oligonucleotide"
aauauggccuuguagcccaucuu

SEQ ID NO: 2282 - RNA, 21 nt, Artificial Sequence
  source: /note="Description of Artificial Sequence: Synthetic oligonucleotide"
acuggagagaauuggaauggg

SEQ ID NO: 2283 - RNA, 23 nt, Artificial Sequence
  source: /note="Description of Artificial Sequence: Synthetic oligonucleotide"
cccauuccaauucucuccagugc

SEQ ID NO: 2284 - RNA, 21 nt, Artificial Sequence
  source: /note="Description of Artificial Sequence: Synthetic oligonucleotide"
cuggagagaauuggaaugggu

SEQ ID NO: 2285 - RNA, 23 nt, Artificial Sequence
  source: /note="Description of Artificial Sequence: Synthetic oligonucleotide"
acccauuccaauucucuccagug

SEQ ID NO: 2286 - RNA, 21 nt, Artificial Sequence
  source: /note="Description of Artificial Sequence: Synthetic oligonucleotide"
uagcacuggagagaauuggaa

SEQ ID NO: 2287 - RNA, 23 nt, Artificial Sequence
  source: /note="Description of Artificial Sequence: Synthetic oligonucleotide"
uuccaauucucuccagugcuacc

SEQ ID NO: 2288 - RNA, 21 nt, Artificial Sequence
  source: /note="Description of Artificial Sequence: Synthetic oligonucleotide"
guagcacuggagagaauugga

SEQ ID NO: 2289 - RNA, 23 nt, Artificial Sequence
  source: /note="Description of Artificial Sequence: Synthetic oligonucleotide"
uccaauucucuccagugcuaccu

SEQ ID NO: 2290 - RNA, 21 nt, Artificial Sequence
  source: /note="Description of Artificial Sequence: Synthetic oligonucleotide"
acaguggacacaccuuaccug

SEQ ID NO: 2291 - RNA, 23 nt, Artificial Sequence
  source: /note="Description of Artificial Sequence: Synthetic oligonucleotide"
cagguaagguguguccacuguca

SEQ ID NO: 2292 - RNA, 21 nt, Artificial Sequence
  source: /note="Description of Artificial Sequence: Synthetic oligonucleotide"
caguggacacaccuuaccugg

SEQ ID NO: 2293 - RNA, 23 nt, Artificial Sequence
  source: /note="Description of Artificial Sequence: Synthetic oligonucleotide"
ccagguaagguguguccacuguc

SEQ ID NO: 2294 - RNA, 21 nt, Artificial Sequence
  source: /note="Description of Artificial Sequence: Synthetic oligonucleotide"
ugugacaguggacacaccuua

SEQ ID NO: 2295 - RNA, 23 nt, Artificial Sequence
  source: /note="Description of Artificial Sequence: Synthetic oligonucleotide"
uaagguguguccacugucacaaa

SEQ ID NO: 2296 - RNA, 21 nt, Artificial Sequence
  source: /note="Description of Artificial Sequence: Synthetic oligonucleotide"
uugugacaguggacacaccuu

SEQ ID NO: 2297 - RNA, 23 nt, Artificial Sequence
  source: /note="Description of Artificial Sequence: Synthetic oligonucleotide"
aagguguguccacugucacaaau

SEQ ID NO: 2298 - RNA, 21 nt, Artificial Sequence
  source: /note="Description of Artificial Sequence: Synthetic oligonucleotide"
gaagacugacaucauugccaa

SEQ ID NO: 2299 - RNA, 23 nt, Artificial Sequence
  source: /note="Description of Artificial Sequence: Synthetic oligonucleotide"
uuggcaaugaugucagucuucuc

SEQ ID NO: 2300 - RNA, 21 nt, Artificial Sequence
  source: /note="Description of Artificial Sequence: Synthetic oligonucleotide"
aagacugacaucauugccaau

SEQ ID NO: 2301 - RNA, 23 nt, Artificial Sequence
  source: /note="Description of Artificial Sequence: Synthetic oligonucleotide"
auuggcaaugaugucagucuucu

SEQ ID NO: 2302 - RNA, 21 nt, Artificial Sequence
  source: /note="Description of Artificial Sequence: Synthetic oligonucleotide"
cugagaagacugacaucauug

SEQ ID NO: 2303 - RNA, 23 nt, Artificial Sequence
  source: /note="Description of Artificial Sequence: Synthetic oligonucleotide"
caaugaugucagucuucucagcc

SEQ ID NO: 2304 - RNA, 21 nt, Artificial Sequence
  source: /note="Description of Artificial Sequence: Synthetic oligonucleotide"
gcugagaagacugacaucauu

SEQ ID NO: 2305 - RNA, 23 nt, Artificial Sequence
  source: /note="Description of Artificial Sequence: Synthetic oligonucleotide"
aaugaugucagucuucucagcca

SEQ ID NO: 2306 - RNA, 21 nt, Artificial Sequence
  source: /note="Description of Artificial Sequence: Synthetic oligonucleotide"
gcucagguucaaaguguuggu

SEQ ID NO: 2307 - RNA, 23 nt, Artificial Sequence
  source: /note="Description of Artificial Sequence: Synthetic oligonucleotide"
accaacacuuugaaccugagcuu

SEQ ID NO: 2308 - RNA, 21 nt, Artificial Sequence
  source: /note="Description of Artificial Sequence: Synthetic oligonucleotide"
cucagguucaaaguguuggua

SEQ ID NO: 2309 - RNA, 23 nt, Artificial Sequence
  source: /note="Description of Artificial Sequence: Synthetic oligonucleotide"
uaccaacacuuugaaccugagcu

SEQ ID NO: 2310 - RNA, 21 nt, Artificial Sequence
  source: /note="Description of Artificial Sequence: Synthetic oligonucleotide"
guaagcucagguucaaagugu

SEQ ID NO: 2311 - RNA, 23 nt, Artificial Sequence
  source: /note="Description of Artificial Sequence: Synthetic oligonucleotide"
acacuuugaaccugagcuuacaa

SEQ ID NO: 2312 - RNA, 21 nt, Artificial Sequence
  source: /note="Description of Artificial Sequence: Synthetic oligonucleotide"
uguaagcucagguucaaagug

SEQ ID NO: 2313 - RNA, 23 nt, Artificial Sequence
  source: /note="Description of Artificial Sequence: Synthetic oligonucleotide"
cacuuugaaccugagcuuacaau

SEQ ID NO: 2314 - RNA, 21 nt, Artificial Sequence
  source: /note="Description of Artificial Sequence: Synthetic oligonucleotide"
auguauuacuugacaaagaga

SEQ ID NO: 2315 - RNA, 23 nt, Artificial Sequence
  source: /note="Description of Artificial Sequence: Synthetic oligonucleotide"
ucucuuugucaaguaauacaugc

SEQ ID NO: 2316 - RNA, 21 nt, Artificial Sequence
  source: /note="Description of Artificial Sequence: Synthetic oligonucleotide"
uguauuacuugacaaagagac

SEQ ID NO: 2317 - RNA, 23 nt, Artificial Sequence
  source: /note="Description of Artificial Sequence: Synthetic oligonucleotide"
gucucuuugucaaguaauacaug

SEQ ID NO: 2318 - RNA, 21 nt, Artificial Sequence
  source: /note="Description of Artificial Sequence: Synthetic oligonucleotide"
cagcauguauuacuugacaaa

SEQ ID NO: 2319 - RNA, 23 nt, Artificial Sequence
  source: /note="Description of Artificial Sequence: Synthetic oligonucleotide"
uuugucaaguaauacaugcugaa

SEQ ID NO: 2320 - RNA, 21 nt, Artificial Sequence
  source: /note="Description of Artificial Sequence: Synthetic oligonucleotide"
ucagcauguauuacuugacaa

SEQ ID NO: 2321 - RNA, 23 nt, Artificial Sequence
  source: /note="Description of Artificial Sequence: Synthetic oligonucleotide"
uugucaaguaauacaugcugaaa

SEQ ID NO: 2322 - RNA, 21 nt, Artificial Sequence
  source: /note="Description of Artificial Sequence: Synthetic oligonucleotide"
cugcaacuguauaucuacaag

SEQ ID NO: 2323 - RNA, 23 nt, Artificial Sequence
  source: /note="Description of Artificial Sequence: Synthetic oligonucleotide"
cuuguagauauacaguugcagcc

SEQ ID NO: 2324 - RNA, 21 nt, Artificial Sequence
  source: /note="Description of Artificial Sequence: Synthetic oligonucleotide"
ugcaacuguauaucuacaagg

SEQ ID NO: 2325 - RNA, 23 nt, Artificial Sequence
  source: /note="Description of Artificial Sequence: Synthetic oligonucleotide"
ccuuguagauauacaguugcagc

SEQ ID NO: 2326 - RNA, 21 nt, Artificial Sequence
  source: /note="Description of Artificial Sequence: Synthetic oligonucleotide"
uuggcugcaacuguauaucua

SEQ ID NO: 2327 - RNA, 23 nt, Artificial Sequence
  source: /note="Description of Artificial Sequence: Synthetic oligonucleotide"
uagauauacaguugcagccaacg

SEQ ID NO: 2328 - RNA, 21 nt, Artificial Sequence
  source: /note="Description of Artificial Sequence: Synthetic oligonucleotide"
guuggcugcaacuguauaucu

SEQ ID NO: 2329 - RNA, 23 nt, Artificial Sequence
  source: /note="Description of Artificial Sequence: Synthetic oligonucleotide"
agauauacaguugcagccaacga

SEQ ID NO: 2330 - RNA, 21 nt, Artificial Sequence
  source: /note="Description of Artificial Sequence: Synthetic oligonucleotide"
caaaugaugaagaaacuuugg

SEQ ID NO: 2331 - RNA, 23 nt, Artificial Sequence
  source: /note="Description of Artificial Sequence: Synthetic oligonucleotide"
ccaaaguuucuucaucauuugcc

SEQ ID NO: 2332 - RNA, 21 nt, Artificial Sequence
  source: /note="Description of Artificial Sequence: Synthetic oligonucleotide"
aaaugaugaagaaacuuuggc

SEQ ID NO: 2333 - RNA, 23 nt, Artificial Sequence
  source: /note="Description of Artificial Sequence: Synthetic oligonucleotide"
gccaaaguuucuucaucauuugc

SEQ ID NO: 2334 - RNA, 21 nt, Artificial Sequence
  source: /note="Description of Artificial Sequence: Synthetic oligonucleotide"
ggggcaaaugaugaagaaacu

SEQ ID NO: 2335 - RNA, 23 nt, Artificial Sequence
  source: /note="Description of Artificial Sequence: Synthetic oligonucleotide"
aguuucuucaucauuugccccag

SEQ ID NO: 2336 - RNA, 21 nt, Artificial Sequence
  source: /note="Description of Artificial Sequence: Synthetic oligonucleotide"
uggggcaaaugaugaagaaac

SEQ ID NO: 2337 - RNA, 23 nt, Artificial Sequence
  source: /note="Description of Artificial Sequence: Synthetic oligonucleotide"
guuucuucaucauuugccccaga

SEQ ID NO: 2338 - RNA, 21 nt, Artificial Sequence
  source: /note="Description of Artificial Sequence: Synthetic oligonucleotide"
caaagggugucguucuuuucc

SEQ ID NO: 2339 - RNA, 23 nt, Artificial Sequence
  source: /note="Description of Artificial Sequence: Synthetic oligonucleotide"
ggaaaagaacgacacccuuugua

SEQ ID NO: 2340 - RNA, 21 nt, Artificial Sequence
  source: /note="Description of Artificial Sequence: Synthetic oligonucleotide"
aaagggugucguucuuuucca

SEQ ID NO: 2341 - RNA, 23 nt, Artificial Sequence
  source: /note="Description of Artificial Sequence: Synthetic oligonucleotide"
uggaaaagaacgacacccuuugu

SEQ ID NO: 2342 - RNA, 21 nt, Artificial Sequence
  source: /note="Description of Artificial Sequence: Synthetic oligonucleotide"
aauacaaagggugucguucuu

SEQ ID NO: 2343 - RNA, 23 nt, Artificial Sequence
  source: /note="Description of Artificial Sequence: Synthetic oligonucleotide"
aagaacgacacccuuuguauuga

SEQ ID NO: 2344 - RNA, 21 nt, Artificial Sequence
  source: /note="Description of Artificial Sequence: Synthetic oligonucleotide"
caauacaaagggugucguucu

SEQ ID NO: 2345 - RNA, 23 nt, Artificial Sequence
  source: /note="Description of Artificial Sequence: Synthetic oligonucleotide"
agaacgacacccuuuguauugaa

SEQ ID NO: 2346 - RNA, 21 nt, Artificial Sequence
  source: /note="Description of Artificial Sequence: Synthetic oligonucleotide"
aaaggcacugauguucugaaa

SEQ ID NO: 2347 - RNA, 23 nt, Artificial Sequence
  source: /note="Description of Artificial Sequence: Synthetic oligonucleotide"
uuucagaacaucagugccuuucc

SEQ ID NO: 2348 - RNA, 21 nt, Artificial Sequence
  source: /note="Description of Artificial Sequence: Synthetic oligonucleotide"
aaggcacugauguucugaaag

SEQ ID NO: 2349 - RNA, 23 nt, Artificial Sequence
  source: /note="Description of Artificial Sequence: Synthetic oligonucleotide"
cuuucagaacaucagugccuuuc

SEQ ID NO: 2350 - RNA, 21 nt, Artificial Sequence
  source: /note="Description of Artificial Sequence: Synthetic oligonucleotide"
gcggaaaggcacugauguucu

SEQ ID NO: 2351 - RNA, 23 nt, Artificial Sequence
  source: /note="Description of Artificial Sequence: Synthetic oligonucleotide"
agaacaucagugccuuuccgcac

SEQ ID NO: 2352 - RNA, 21 nt, Artificial Sequence
  source: /note="Description of Artificial Sequence: Synthetic oligonucleotide"
ugcggaaaggcacugauguuc

SEQ ID NO: 2353 - RNA, 23 nt, Artificial Sequence
  source: /note="Description of Artificial Sequence: Synthetic oligonucleotide"
gaacaucagugccuuuccgcaca

SEQ ID NO: 2354 - RNA, 21 nt, Artificial Sequence
  source: /note="Description of Artificial Sequence: Synthetic oligonucleotide"
aaggaugcuccggaauguugc

SEQ ID NO: 2355 - RNA, 23 nt, Artificial Sequence
  source: /note="Description of Artificial Sequence: Synthetic oligonucleotide"
gcaacauuccggagcauccuugg

SEQ ID NO: 2356 - RNA, 21 nt, Artificial Sequence
  source: /note="Description of Artificial Sequence: Synthetic oligonucleotide"
aggaugcuccggaauguugcu

SEQ ID NO: 2357 - RNA, 23 nt, Artificial Sequence
  source: /note="Description of Artificial Sequence: Synthetic oligonucleotide"
agcaacauuccggagcauccuug

SEQ ID NO: 2358 - RNA, 21 nt, Artificial Sequence
  source: /note="Description of Artificial Sequence: Synthetic oligonucleotide"
auccaaggaugcuccggaaug

SEQ ID NO: 2359 - RNA, 23 nt, Artificial Sequence
  source: /note="Description of Artificial Sequence: Synthetic oligonucleotide"
cauuccggagcauccuuggauac

SEQ ID NO: 2360 - RNA, 21 nt, Artificial Sequence
  source: /note="Description of Artificial Sequence: Synthetic oligonucleotide"
uauccaaggaugcuccggaau

SEQ ID NO: 2361 - RNA, 23 nt, Artificial Sequence
  source: /note="Description of Artificial Sequence: Synthetic oligonucleotide"
auuccggagcauccuuggauaca

SEQ ID NO: 2362 - RNA, 21 nt, Artificial Sequence
  source: /note="Description of Artificial Sequence: Synthetic oligonucleotide"
aauggguggcgguaauuggug

SEQ ID NO: 2363 - RNA, 23 nt, Artificial Sequence
  source: /note="Description of Artificial Sequence: Synthetic oligonucleotide"
caccaauuaccgccacccauucc

SEQ ID NO: 2364 - RNA, 21 nt, Artificial Sequence
  source: /note="Description of Artificial Sequence: Synthetic oligonucleotide"
auggguggcgguaauugguga

SEQ ID NO: 2365 - RNA, 23 nt, Artificial Sequence
  source: /note="Description of Artificial Sequence: Synthetic oligonucleotide"
ucaccaauuaccgccacccauuc

SEQ ID NO: 2366 - RNA, 21 nt, Artificial Sequence
  source: /note="Description of Artificial Sequence: Synthetic oligonucleotide"
uuggaauggguggcgguaauu

SEQ ID NO: 2367 - RNA, 23 nt, Artificial Sequence
  source: /note="Description of Artificial Sequence: Synthetic oligonucleotide"
aauuaccgccacccauuccaauu

SEQ ID NO: 2368 - RNA, 21 nt, Artificial Sequence
  source: /note="Description of Artificial Sequence: Synthetic oligonucleotide"
auuggaauggguggcgguaau

SEQ ID NO: 2369 - RNA, 23 nt, Artificial Sequence
  source: /note="Description of Artificial Sequence: Synthetic oligonucleotide"
auuaccgccacccauuccaauuc

SEQ ID NO: 2370 - RNA, 21 nt, Artificial Sequence
  source: /note="Description of Artificial Sequence: Synthetic oligonucleotide"
ggaaaggcacugauguucuga

SEQ ID NO: 2371 - RNA, 23 nt, Artificial Sequence
  source: /note="Description of Artificial Sequence: Synthetic oligonucleotide"
ucagaacaucagugccuuuccgc

SEQ ID NO: 2372 - RNA, 21 nt, Artificial Sequence
  source: /note="Description of Artificial Sequence: Synthetic oligonucleotide"
gaaaggcacugauguucugaa

SEQ ID NO: 2373 - RNA, 23 nt, Artificial Sequence
  source: /note="Description of Artificial Sequence: Synthetic oligonucleotide"
uucagaacaucagugccuuuccg

SEQ ID NO: 2374 - RNA, 21 nt, Artificial Sequence
  source: /note="Description of Artificial Sequence: Synthetic oligonucleotide"
gugcggaaaggcacugauguu

SEQ ID NO: 2375 - RNA, 23 nt, Artificial Sequence
  source: /note="Description of Artificial Sequence: Synthetic oligonucleotide"
aacaucagugccuuuccgcacac

SEQ ID NO: 2376 - RNA, 21 nt, Artificial Sequence
  source: /note="Description of Artificial Sequence: Synthetic oligonucleotide"
ugugcggaaaggcacugaugu

SEQ ID NO: 2377 - RNA, 23 nt, Artificial Sequence
  source: /note="Description of Artificial Sequence: Synthetic oligonucleotide"
acaucagugccuuuccgcacacc

SEQ ID NO: 2378 - RNA, 21 nt, Artificial Sequence
  source: /note="Description of Artificial Sequence: Synthetic oligonucleotide"
aauuguaagcucagguucaaa

SEQ ID NO: 2379 - RNA, 23 nt, Artificial Sequence
  source: /note="Description of Artificial Sequence: Synthetic oligonucleotide"
uuugaaccugagcuuacaauuua

SEQ ID NO: 2380 - RNA, 21 nt, Artificial Sequence
  source: /note="Description of Artificial Sequence: Synthetic oligonucleotide"
auuguaagcucagguucaaag

SEQ ID NO: 2381 - RNA, 23 nt, Artificial Sequence
  source: /note="Description of Artificial Sequence: Synthetic oligonucleotide"
cuuugaaccugagcuuacaauuu

SEQ ID NO: 2382 - RNA, 21 nt, Artificial Sequence
  source: /note="Description of Artificial Sequence: Synthetic oligonucleotide"
cuuaaauuguaagcucagguu

SEQ ID NO: 2383 - RNA, 23 nt, Artificial Sequence
  source: /note="Description of Artificial Sequence: Synthetic oligonucleotide"
aaccugagcuuacaauuuaagaa

SEQ ID NO: 2384 - RNA, 21 nt, Artificial Sequence
  source: /note="Description of Artificial Sequence: Synthetic oligonucleotide"
ucuuaaauuguaagcucaggu

SEQ ID NO: 2385 - RNA, 23 nt, Artificial Sequence
  source: /note="Description of Artificial Sequence: Synthetic oligonucleotide"
accugagcuuacaauuuaagaac

SEQ ID NO: 2386 - RNA, 21 nt, Artificial Sequence
  source: /note="Description of Artificial Sequence: Synthetic oligonucleotide"
gcaaacacuaaggugaaaaga

SEQ ID NO: 2387 - RNA, 23 nt, Artificial Sequence
  source: /note="Description of Artificial Sequence: Synthetic oligonucleotide"
ucuuuucaccuuaguguuugcua

SEQ ID NO: 2388 - RNA, 21 nt, Artificial Sequence
  source: /note="Description of Artificial Sequence: Synthetic oligonucleotide"
caaacacuaaggugaaaagau

SEQ ID NO: 2389 - RNA, 23 nt, Artificial Sequence
  source: /note="Description of Artificial Sequence: Synthetic oligonucleotide"
aucuuuucaccuuaguguuugcu

SEQ ID NO: 2390 - RNA, 21 nt, Artificial Sequence
  source: /note="Description of Artificial Sequence: Synthetic oligonucleotide"
gguagcaaacacuaaggugaa

SEQ ID NO: 2391 - RNA, 23 nt, Artificial Sequence
  source: /note="Description of Artificial Sequence: Synthetic oligonucleotide"
uucaccuuaguguuugcuaccuc

SEQ ID NO: 2392 - RNA, 21 nt, Artificial Sequence
  source: /note="Description of Artificial Sequence: Synthetic oligonucleotide"
agguagcaaacacuaagguga

SEQ ID NO: 2393 - RNA, 23 nt, Artificial Sequence
  source: /note="Description of Artificial Sequence: Synthetic oligonucleotide"
ucaccuuaguguuugcuaccucc

SEQ ID NO: 2394 - RNA, 21 nt, Artificial Sequence
  source: /note="Description of Artificial Sequence: Synthetic oligonucleotide"
agguagcaaacacuaagguga

SEQ ID NO: 2395 - RNA, 23 nt, Artificial Sequence
  source: /note="Description of Artificial Sequence: Synthetic oligonucleotide"
ucaccuuaguguuugcuaccucc

SEQ ID NO: 2396 - RNA, 21 nt, Artificial Sequence
  source: /note="Description of Artificial Sequence: Synthetic oligonucleotide"
gguagcaaacacuaaggugaa

SEQ ID NO: 2397 - RNA, 23 nt, Artificial Sequence
  source: /note="Description of Artificial Sequence: Synthetic oligonucleotide"
uucaccuuaguguuugcuaccuc

SEQ ID NO: 2398 - RNA, 21 nt, Artificial Sequence
  source: /note="Description of Artificial Sequence: Synthetic oligonucleotide"
uuggagguagcaaacacuaag

SEQ ID NO: 2399 - RNA, 23 nt, Artificial Sequence
  source: /note="Description of Artificial Sequence: Synthetic oligonucleotide"
cuuaguguuugcuaccuccaauu

SEQ ID NO: 2400 - RNA, 21 nt, Artificial Sequence
  source: /note="Description of Artificial Sequence: Synthetic oligonucleotide"
auuggagguagcaaacacuaa

SEQ ID NO: 2401 - RNA, 23 nt, Artificial Sequence
  source: /note="Description of Artificial Sequence: Synthetic oligonucleotide"
uuaguguuugcuaccuccaauuu

SEQ ID NO: 2402 - RNA, 21 nt, Artificial Sequence
  source: /note="Description of Artificial Sequence: Synthetic oligonucleotide"
uaaagugcuguauccuuuagu

SEQ ID NO: 2403 - RNA, 23 nt, Artificial Sequence
  source: /note="Description of Artificial Sequence: Synthetic oligonucleotide"
acuaaaggauacagcacuuuagc

SEQ ID NO: 2404 - RNA, 21 nt, Artificial Sequence
  source: /note="Description of Artificial Sequence: Synthetic oligonucleotide"
aaagugcuguauccuuuagua

SEQ ID NO: 2405 - RNA, 23 nt, Artificial Sequence
  source: /note="Description of Artificial Sequence: Synthetic oligonucleotide"
uacuaaaggauacagcacuuuag

SEQ ID NO: 2406 - RNA, 21 nt, Artificial Sequence
  source: /note="Description of Artificial Sequence: Synthetic oligonucleotide"
aggcuaaagugcuguauccuu

SEQ ID NO: 2407 - RNA, 23 nt, Artificial Sequence
  source: /note="Description of Artificial Sequence: Synthetic oligonucleotide"
aaggauacagcacuuuagccugc

SEQ ID NO: 2408 - RNA, 21 nt, Artificial Sequence
  source: /note="Description of Artificial Sequence: Synthetic oligonucleotide"
caggcuaaagugcuguauccu

SEQ ID NO: 2409 - RNA, 23 nt, Artificial Sequence
  source: /note="Description of Artificial Sequence: Synthetic oligonucleotide"
aggauacagcacuuuagccugcc

SEQ ID NO: 2410 - RNA, 21 nt, Artificial Sequence
  source: /note="Description of Artificial Sequence: Synthetic oligonucleotide"
aagacauuggugaggaaaaau

SEQ ID NO: 2411 - RNA, 23 nt, Artificial Sequence
  source: /note="Description of Artificial Sequence: Synthetic oligonucleotide"
auuuuuccucaccaaugucuugu

SEQ ID NO: 2412 - RNA, 21 nt, Artificial Sequence
  source: /note="Description of Artificial Sequence: Synthetic oligonucleotide"
agacauuggugaggaaaaauc

SEQ ID NO: 2413 - RNA, 23 nt, Artificial Sequence
  source: /note="Description of Artificial Sequence: Synthetic oligonucleotide"
gauuuuuccucaccaaugucuug

SEQ ID NO: 2414 - RNA, 21 nt, Artificial Sequence
  source: /note="Description of Artificial Sequence: Synthetic oligonucleotide"
cgacaagacauuggugaggaa

SEQ ID NO: 2415 - RNA, 23 nt, Artificial Sequence
  source: /note="Description of Artificial Sequence: Synthetic oligonucleotide"
uuccucaccaaugucuugucgau

SEQ ID NO: 2416 - RNA, 21 nt, Artificial Sequence
  source: /note="Description of Artificial Sequence: Synthetic oligonucleotide"
ucgacaagacauuggugagga

SEQ ID NO: 2417 - RNA, 23 nt, Artificial Sequence
  source: /note="Description of Artificial Sequence: Synthetic oligonucleotide"
uccucaccaaugucuugucgaug

SEQ ID NO: 2418 - RNA, 21 nt, Artificial Sequence
  source: /note="Description of Artificial Sequence: Synthetic oligonucleotide"
aagauguccucgagauacuaa

SEQ ID NO: 2419 - RNA, 23 nt, Artificial Sequence
  source: /note="Description of Artificial Sequence: Synthetic oligonucleotide"
uuaguaucucgaggacaucuuga

SEQ ID NO: 2420 - RNA, 21 nt, Artificial Sequence
  source: /note="Description of Artificial Sequence: Synthetic oligonucleotide"
agauguccucgagauacuaaa

SEQ ID NO: 2421 - RNA, 23 nt, Artificial Sequence
  source: /note="Description of Artificial Sequence: Synthetic oligonucleotide"
uuuaguaucucgaggacaucuug

SEQ ID NO: 2422 - RNA, 21 nt, Artificial Sequence
  source: /note="Description of Artificial Sequence: Synthetic oligonucleotide"
guucaagauguccucgagaua

SEQ ID NO: 2423 - RNA, 23 nt, Artificial Sequence
  source: /note="Description of Artificial Sequence: Synthetic oligonucleotide"
uaucucgaggacaucuugaacac

SEQ ID NO: 2424 - RNA, 21 nt, Artificial Sequence
  source: /note="Description of Artificial Sequence: Synthetic oligonucleotide"
uguucaagauguccucgagau

SEQ ID NO: 2425 - RNA, 23 nt, Artificial Sequence
  source: /note="Description of Artificial Sequence: Synthetic oligonucleotide"
aucucgaggacaucuugaacacc

SEQ ID NO: 2426 - RNA, 21 nt, Artificial Sequence
  source: /note="Description of Artificial Sequence: Synthetic oligonucleotide"
gagaaagguguucaagauguc

SEQ ID NO: 2427 - RNA, 23 nt, Artificial Sequence
  source: /note="Description of Artificial Sequence: Synthetic oligonucleotide"
gacaucuugaacaccuuucuccc

SEQ ID NO: 2428 - RNA, 21 nt, Artificial Sequence
  source: /note="Description of Artificial Sequence: Synthetic oligonucleotide"
agaaagguguucaagaugucc

SEQ ID NO: 2429 - RNA, 23 nt, Artificial Sequence
  source: /note="Description of Artificial Sequence: Synthetic oligonucleotide"
ggacaucuugaacaccuuucucc

SEQ ID NO: 2430 - RNA, 21 nt, Artificial Sequence
  source: /note="Description of Artificial Sequence: Synthetic oligonucleotide"
gggggagaaagguguucaaga

SEQ ID NO: 2431 - RNA, 23 nt, Artificial Sequence
  source: /note="Description of Artificial Sequence: Synthetic oligonucleotide"
ucuugaacaccuuucucccccug

SEQ ID NO: 2432 - RNA, 21 nt, Artificial Sequence
  source: /note="Description of Artificial Sequence: Synthetic oligonucleotide"
agggggagaaagguguucaag

SEQ ID NO: 2433 - RNA, 23 nt, Artificial Sequence
  source: /note="Description of Artificial Sequence: Synthetic oligonucleotide"
cuugaacaccuuucucccccugg

SEQ ID NO: 2434 - RNA, 21 nt, Artificial Sequence
  source: /note="Description of Artificial Sequence: Synthetic oligonucleotide"
gcugggaagauaucaaauggc

SEQ ID NO: 2435 - RNA, 23 nt, Artificial Sequence
  source: /note="Description of Artificial Sequence: Synthetic oligonucleotide"
gccauuugauaucuucccagcug

SEQ ID NO: 2436 - RNA, 21 nt, Artificial Sequence
  source: /note="Description of Artificial Sequence: Synthetic oligonucleotide"
cugggaagauaucaaauggcu

SEQ ID NO: 2437 - RNA, 23 nt, Artificial Sequence
  source: /note="Description of Artificial Sequence: Synthetic oligonucleotide"
agccauuugauaucuucccagcu

SEQ ID NO: 2438 - RNA, 21 nt, Artificial Sequence
  source: /note="Description of Artificial Sequence: Synthetic oligonucleotide"
aucagcugggaagauaucaaa

SEQ ID NO: 2439 - RNA, 23 nt, Artificial Sequence
  source: /note="Description of Artificial Sequence: Synthetic oligonucleotide"
uuugauaucuucccagcugauag

SEQ ID NO: 2440 - RNA, 21 nt, Artificial Sequence
  source: /note="Description of Artificial Sequence: Synthetic oligonucleotide"
uaucagcugggaagauaucaa

SEQ ID NO: 2441 - RNA, 23 nt, Artificial Sequence
  source: /note="Description of Artificial Sequence: Synthetic oligonucleotide"
uugauaucuucccagcugauaga

SEQ ID NO: 2442 - RNA, 21 nt, Artificial Sequence
  source: /note="Description of Artificial Sequence: Synthetic oligonucleotide"
ucugucgacuucuguuuuagg

SEQ ID NO: 2443 - RNA, 23 nt, Artificial Sequence
  source: /note="Description of Artificial Sequence: Synthetic oligonucleotide"
ccuaaaacagaagucgacagauc

SEQ ID NO: 2444 - RNA, 21 nt, Artificial Sequence
  source: /note="Description of Artificial Sequence: Synthetic oligonucleotide"
cugucgacuucuguuuuagga

SEQ ID NO: 2445 - RNA, 23 nt, Artificial Sequence
  source: /note="Description of Artificial Sequence: Synthetic oligonucleotide"
uccuaaaacagaagucgacagau

SEQ ID NO: 2446 - RNA, 21 nt, Artificial Sequence
  source: /note="Description of Artificial Sequence: Synthetic oligonucleotide"
cagaucugucgacuucuguuu

SEQ ID NO: 2447 - RNA, 23 nt, Artificial Sequence
  source: /note="Description of Artificial Sequence: Synthetic oligonucleotide"
aaacagaagucgacagaucuguu

SEQ ID NO: 2448 - RNA, 21 nt, Artificial Sequence
  source: /note="Description of Artificial Sequence: Synthetic oligonucleotide"
acagaucugucgacuucuguu

SEQ ID NO: 2449 - RNA, 23 nt, Artificial Sequence
  source: /note="Description of Artificial Sequence: Synthetic oligonucleotide"
aacagaagucgacagaucuguuu

SEQ ID NO: 2450 - RNA, 21 nt, Artificial Sequence
  source: /note="Description of Artificial Sequence: Synthetic oligonucleotide"
uacuucuuugaauguagauuu

SEQ ID NO: 2451 - RNA, 23 nt, Artificial Sequence
  source: /note="Description of Artificial Sequence: Synthetic oligonucleotide"
aaaucuacauucaaagaaguauc

SEQ ID NO: 2452 - RNA, 21 nt, Artificial Sequence
  source: /note="Description of Artificial Sequence: Synthetic oligonucleotide"
acuucuuugaauguagauuuc

SEQ ID NO: 2453 - RNA, 23 nt, Artificial Sequence
  source: /note="Description of Artificial Sequence: Synthetic oligonucleotide"
gaaaucuacauucaaagaaguau

SEQ ID NO: 2454 - RNA, 21 nt, Artificial Sequence
  source: /note="Description of Artificial Sequence: Synthetic oligonucleotide"
gugauacuucuuugaauguag

SEQ ID NO: 2455 - RNA, 23 nt, Artificial Sequence
  source: /note="Description of Artificial Sequence: Synthetic oligonucleotide"
cuacauucaaagaaguaucacca

SEQ ID NO: 2456 - RNA, 21 nt, Artificial Sequence
  source: /note="Description of Artificial Sequence: Synthetic oligonucleotide"
ggugauacuucuuugaaugua

SEQ ID NO: 2457 - RNA, 23 nt, Artificial Sequence
  source: /note="Description of Artificial Sequence: Synthetic oligonucleotide"
uacauucaaagaaguaucaccaa

SEQ ID NO: 2458 - RNA, 21 nt, Artificial Sequence
  source: /note="Description of Artificial Sequence: Synthetic oligonucleotide"
ugggaagauaucaaauggcug

SEQ ID NO: 2459 - RNA, 23 nt, Artificial Sequence
  source: /note="Description of Artificial Sequence: Synthetic oligonucleotide"
cagccauuugauaucuucccagc

SEQ ID NO: 2460 - RNA, 21 nt, Artificial Sequence
  source: /note="Description of Artificial Sequence: Synthetic oligonucleotide"
gggaagauaucaaauggcuga

SEQ ID NO: 2461 - RNA, 23 nt, Artificial Sequence
  source: /note="Description of Artificial Sequence: Synthetic oligonucleotide"
ucagccauuugauaucuucccag

SEQ ID NO: 2462 - RNA, 21 nt, Artificial Sequence
  source: /note="Description of Artificial Sequence: Synthetic oligonucleotide"
cagcugggaagauaucaaaug

SEQ ID NO: 2463 - RNA, 23 nt, Artificial Sequence
  source: /note="Description of Artificial Sequence: Synthetic oligonucleotide"
cauuugauaucuucccagcugau

SEQ ID NO: 2464 - RNA, 21 nt, Artificial Sequence
  source: /note="Description of Artificial Sequence: Synthetic oligonucleotide"
ucagcugggaagauaucaaau

SEQ ID NO: 2465 - RNA, 23 nt, Artificial Sequence
  source: /note="Description of Artificial Sequence: Synthetic oligonucleotide"
auuugauaucuucccagcugaua

SEQ ID NO: 2466 - RNA, 21 nt, Artificial Sequence
  source: /note="Description of Artificial Sequence: Synthetic oligonucleotide"
uccaaagucuauauaugacua

SEQ ID NO: 2467 - RNA, 23 nt, Artificial Sequence
  source: /note="Description of Artificial Sequence: Synthetic oligonucleotide"
uagucauauauagacuuuggaag

SEQ ID NO: 2468 - RNA, 21 nt, Artificial Sequence
  source: /note="Description of Artificial Sequence: Synthetic oligonucleotide"
ccaaagucuauauaugacuau

SEQ ID NO: 2469 - RNA, 23 nt, Artificial Sequence
  source: /note="Description of Artificial Sequence: Synthetic oligonucleotide"
auagucauauauagacuuuggaa

SEQ ID NO: 2470 - RNA, 21 nt, Artificial Sequence
  source: /note="Description of Artificial Sequence: Synthetic oligonucleotide"
uacuuccaaagucuauauaug

SEQ ID NO: 2471 - RNA, 23 nt, Artificial Sequence
  source: /note="Description of Artificial Sequence: Synthetic oligonucleotide"
cauauauagacuuuggaaguacu

SEQ ID NO: 2472 - RNA, 21 nt, Artificial Sequence
  source: /note="Description of Artificial Sequence: Synthetic oligonucleotide"
guacuuccaaagucuauauau

SEQ ID NO: 2473 - RNA, 23 nt, Artificial Sequence
  source: /note="Description of Artificial Sequence: Synthetic oligonucleotide"
auauauagacuuuggaaguacug

SEQ ID NO: 2474 - RNA, 21 nt, Artificial Sequence
  source: /note="Description of Artificial Sequence: Synthetic oligonucleotide"
uuaugaacaacaugcuaaauc

SEQ ID NO: 2475 - RNA, 23 nt, Artificial Sequence
  source: /note="Description of Artificial Sequence: Synthetic oligonucleotide"
gauuuagcauguuguucauaauc

SEQ ID NO: 2476 - RNA, 21 nt, Artificial Sequence
  source: /note="Description of Artificial Sequence: Synthetic oligonucleotide"
uaugaacaacaugcuaaauca

SEQ ID NO: 2477 - RNA, 23 nt, Artificial Sequence
  source: /note="Description of Artificial Sequence: Synthetic oligonucleotide"
ugauuuagcauguuguucauaau

SEQ ID NO: 2478 - RNA, 21 nt, Artificial Sequence
  source: /note="Description of Artificial Sequence: Synthetic oligonucleotide"
augauuaugaacaacaugcua

SEQ ID NO: 2479 - RNA, 23 nt, Artificial Sequence
  source: /note="Description of Artificial Sequence: Synthetic oligonucleotide"
uagcauguuguucauaaucauug

SEQ ID NO: 2480 - RNA, 21 nt, Artificial Sequence
  source: /note="Description of Artificial Sequence: Synthetic oligonucleotide"
aaugauuaugaacaacaugcu

SEQ ID NO: 2481 - RNA, 23 nt, Artificial Sequence
  source: /note="Description of Artificial Sequence: Synthetic oligonucleotide"
agcauguuguucauaaucauuga

SEQ ID NO: 2482 - RNA, 21 nt, Artificial Sequence
  source: /note="Description of Artificial Sequence: Synthetic oligonucleotide"
aauuccccacuucaauacaaa

SEQ ID NO: 2483 - RNA, 23 nt, Artificial Sequence
  source: /note="Description of Artificial Sequence: Synthetic oligonucleotide"
uuuguauugaaguggggaauuac

SEQ ID NO: 2484 - RNA, 21 nt, Artificial Sequence
  source: /note="Description of Artificial Sequence: Synthetic oligonucleotide"
auuccccacuucaauacaaag

SEQ ID NO: 2485 - RNA, 23 nt, Artificial Sequence
  source: /note="Description of Artificial Sequence: Synthetic oligonucleotide"
cuuuguauugaaguggggaauua

SEQ ID NO: 2486 - RNA, 21 nt, Artificial Sequence
  source: /note="Description of Artificial Sequence: Synthetic oligonucleotide"
cuguaauuccccacuucaaua

SEQ ID NO: 2487 - RNA, 23 nt, Artificial Sequence
  source: /note="Description of Artificial Sequence: Synthetic oligonucleotide"
uauugaaguggggaauuacagac

SEQ ID NO: 2488 - RNA, 21 nt, Artificial Sequence
  source: /note="Description of Artificial Sequence: Synthetic oligonucleotide"
ucuguaauuccccacuucaau

SEQ ID NO: 2489 - RNA, 23 nt, Artificial Sequence
  source: /note="Description of Artificial Sequence: Synthetic oligonucleotide"
auugaaguggggaauuacagacu

SEQ ID NO: 2490 - RNA, 21 nt, Artificial Sequence
  source: /note="Description of Artificial Sequence: Synthetic oligonucleotide"
ugaugugcguaacagauucaa

SEQ ID NO: 2491 - RNA, 23 nt, Artificial Sequence
  source: /note="Description of Artificial Sequence: Synthetic oligonucleotide"
uugaaucuguuacgcacaucauc

SEQ ID NO: 2492 - RNA, 21 nt, Artificial Sequence
  source: /note="Description of Artificial Sequence: Synthetic oligonucleotide"
gaugugcguaacagauucaaa

SEQ ID NO: 2493 - RNA, 23 nt, Artificial Sequence
  source: /note="Description of Artificial Sequence: Synthetic oligonucleotide"
uuugaaucuguuacgcacaucau

SEQ ID NO: 2494 - RNA, 21 nt, Artificial Sequence
  source: /note="Description of Artificial Sequence: Synthetic oligonucleotide"
uggaugaugugcguaacagau

SEQ ID NO: 2495 - RNA, 23 nt, Artificial Sequence
  source: /note="Description of Artificial Sequence: Synthetic oligonucleotide"
aucuguuacgcacaucauccaga

SEQ ID NO: 2496 - RNA, 21 nt, Artificial Sequence
  source: /note="Description of Artificial Sequence: Synthetic oligonucleotide"
cuggaugaugugcguaacaga

SEQ ID NO: 2497 - RNA, 23 nt, Artificial Sequence
  source: /note="Description of Artificial Sequence: Synthetic oligonucleotide"
ucuguuacgcacaucauccagac

SEQ ID NO: 2498 - RNA, 21 nt, Artificial Sequence
  source: /note="Description of Artificial Sequence: Synthetic oligonucleotide"
gaauggguggcgguaauuggu

SEQ ID NO: 2499 - RNA, 23 nt, Artificial Sequence
  source: /note="Description of Artificial Sequence: Synthetic oligonucleotide"
accaauuaccgccacccauucca

SEQ ID NO: 2500 - RNA, 21 nt, Artificial Sequence
  source: /note="Description of Artificial Sequence: Synthetic oligonucleotide"
aauggguggcgguaauuggug

SEQ ID NO: 2501 - RNA, 23 nt, Artificial Sequence
  source: /note="Description of Artificial Sequence: Synthetic oligonucleotide"
caccaauuaccgccacccauucc

SEQ ID NO: 2502 - RNA, 21 nt, Artificial Sequence
  source: /note="Description of Artificial Sequence: Synthetic oligonucleotide"
auuggaauggguggcgguaau

SEQ ID NO: 2503 - RNA, 23 nt, Artificial Sequence
  source: /note="Description of Artificial Sequence: Synthetic oligonucleotide"
auuaccgccacccauuccaauuc

SEQ ID NO: 2504 - RNA, 21 nt, Artificial Sequence
  source: /note="Description of Artificial Sequence: Synthetic oligonucleotide"
aauuggaauggguggcgguaa

SEQ ID NO: 2505 - RNA, 23 nt, Artificial Sequence
  source: /note="Description of Artificial Sequence: Synthetic oligonucleotide"
uuaccgccacccauuccaauucu

SEQ ID NO: 2506 - RNA, 21 nt, Artificial Sequence
  source: /note="Description of Artificial Sequence: Synthetic oligonucleotide"
uccggaauguugcugaaacag

SEQ ID NO: 2507 - RNA, 23 nt, Artificial Sequence
  source: /note="Description of Artificial Sequence: Synthetic oligonucleotide"
cuguuucagcaacauuccggagc

SEQ ID NO: 2508 - RNA, 21 nt, Artificial Sequence
  source: /note="Description of Artificial Sequence: Synthetic oligonucleotide"
ccggaauguugcugaaacaga

SEQ ID NO: 2509 - RNA, 23 nt, Artificial Sequence
  source: /note="Description of Artificial Sequence: Synthetic oligonucleotide"
ucuguuucagcaacauuccggag

SEQ ID NO: 2510 - RNA, 21 nt, Artificial Sequence
  source: /note="Description of Artificial Sequence: Synthetic oligonucleotide"
augcuccggaauguugcugaa

SEQ ID NO: 2511 - RNA, 23 nt, Artificial Sequence
  source: /note="Description of Artificial Sequence: Synthetic oligonucleotide"
uucagcaacauuccggagcaucc

SEQ ID NO: 2512 - RNA, 21 nt, Artificial Sequence
  source: /note="Description of Artificial Sequence: Synthetic oligonucleotide"
gaugcuccggaauguugcuga

SEQ ID NO: 2513 - RNA, 23 nt, Artificial Sequence
  source: /note="Description of Artificial Sequence: Synthetic oligonucleotide"
ucagcaacauuccggagcauccu

SEQ ID NO: 2514 - RNA, 21 nt, Artificial Sequence
  source: /note="Description of Artificial Sequence: Synthetic oligonucleotide"
uguccucgagauacuaaagga

SEQ ID NO: 2515 - RNA, 23 nt, Artificial Sequence
  source: /note="Description of Artificial Sequence: Synthetic oligonucleotide"
uccuuuaguaucucgaggacauc

SEQ ID NO: 2516 - RNA, 21 nt, Artificial Sequence
  source: /note="Description of Artificial Sequence: Synthetic oligonucleotide"
guccucgagauacuaaaggaa

SEQ ID NO: 2517 - RNA, 23 nt, Artificial Sequence
  source: /note="Description of Artificial Sequence: Synthetic oligonucleotide"
uuccuuuaguaucucgaggacau

SEQ ID NO: 2518 - RNA, 21 nt, Artificial Sequence
  source: /note="Description of Artificial Sequence: Synthetic oligonucleotide"
aagauguccucgagauacuaa

SEQ ID NO: 2519 - RNA, 23 nt, Artificial Sequence
  source: /note="Description of Artificial Sequence: Synthetic oligonucleotide"
uuaguaucucgaggacaucuuga

SEQ ID NO: 2520 - RNA, 21 nt, Artificial Sequence
  source: /note="Description of Artificial Sequence: Synthetic oligonucleotide"
caagauguccucgagauacua

SEQ ID NO: 2521 - RNA, 23 nt, Artificial Sequence
  source: /note="Description of Artificial Sequence: Synthetic oligonucleotide"
uaguaucucgaggacaucuugaa

SEQ ID NO: 2522 - RNA, 21 nt, Artificial Sequence
  source: /note="Description of Artificial Sequence: Synthetic oligonucleotide"
acaacaugcuaaaucaguacu

SEQ ID NO: 2523 - RNA, 23 nt, Artificial Sequence
  source: /note="Description of Artificial Sequence: Synthetic oligonucleotide"
aguacugauuuagcauguuguuc

SEQ ID NO: 2524 - RNA, 21 nt, Artificial Sequence
  source: /note="Description of Artificial Sequence: Synthetic oligonucleotide"
caacaugcuaaaucaguacuu

SEQ ID NO: 2525 - RNA, 23 nt, Artificial Sequence
  source: /note="Description of Artificial Sequence: Synthetic oligonucleotide"
aaguacugauuuagcauguuguu

SEQ ID NO: 2526 - RNA, 21 nt, Artificial Sequence
  source: /note="Description of Artificial Sequence: Synthetic oligonucleotide"
augaacaacaugcuaaaucag

SEQ ID NO: 2527 - RNA, 23 nt, Artificial Sequence
  source: /note="Description of Artificial Sequence: Synthetic oligonucleotide"
cugauuuagcauguuguucauaa

SEQ ID NO: 2528 - RNA, 21 nt, Artificial Sequence
  source: /note="Description of Artificial Sequence: Synthetic oligonucleotide"
uaugaacaacaugcuaaauca

SEQ ID NO: 2529 - RNA, 23 nt, Artificial Sequence
  source: /note="Description of Artificial Sequence: Synthetic oligonucleotide"
ugauuuagcauguuguucauaau

SEQ ID NO: 2530 - RNA, 21 nt, Artificial Sequence
  source: /note="Description of Artificial Sequence: Synthetic oligonucleotide"
gccaaggcuguguuugugggg

SEQ ID NO: 2531 - RNA, 23 nt, Artificial Sequence
  source: /note="Description of Artificial Sequence: Synthetic oligonucleotide"
ccccacaaacacagccuuggcgc

SEQ ID NO: 2532 - RNA, 21 nt, Artificial Sequence
  source: /note="Description of Artificial Sequence: Synthetic oligonucleotide"
ccaaggcuguguuugugggga

SEQ ID NO: 2533 - RNA, 23 nt, Artificial Sequence
  source: /note="Description of Artificial Sequence: Synthetic oligonucleotide"
uccccacaaacacagccuuggcg

SEQ ID NO: 2534 - RNA, 21 nt, Artificial Sequence
  source: /note="Description of Artificial Sequence: Synthetic oligonucleotide"
uggcgccaaggcuguguuugu

SEQ ID NO: 2535 - RNA, 23 nt, Artificial Sequence
  source: /note="Description of Artificial Sequence: Synthetic oligonucleotide"
acaaacacagccuuggcgccaag

SEQ ID NO: 2536 - RNA, 21 nt, Artificial Sequence
  source: /note="Description of Artificial Sequence: Synthetic oligonucleotide"
uuggcgccaaggcuguguuug

SEQ ID NO: 2537 - RNA, 23 nt, Artificial Sequence
  source: /note="Description of Artificial Sequence: Synthetic oligonucleotide"
caaacacagccuuggcgccaaga

SEQ ID NO: 2538 - RNA, 21 nt, Artificial Sequence
  source: /note="Description of Artificial Sequence: Synthetic oligonucleotide"
ugaaagcucuggcucuuggcg

SEQ ID NO: 2539 - RNA, 23 nt, Artificial Sequence
  source: /note="Description of Artificial Sequence: Synthetic oligonucleotide"
cgccaagagccagagcuuucaga

SEQ ID NO: 2540 - RNA, 21 nt, Artificial Sequence
  source: /note="Description of Artificial Sequence: Synthetic oligonucleotide"
gaaagcucuggcucuuggcgc

SEQ ID NO: 2541 - RNA, 23 nt, Artificial Sequence
  source: /note="Description of Artificial Sequence: Synthetic oligonucleotide"
gcgccaagagccagagcuuucag

SEQ ID NO: 2542 - RNA, 21 nt, Artificial Sequence
  source: /note="Description of Artificial Sequence: Synthetic oligonucleotide"
guucugaaagcucuggcucuu

SEQ ID NO: 2543 - RNA, 23 nt, Artificial Sequence
  source: /note="Description of Artificial Sequence: Synthetic oligonucleotide"
aagagccagagcuuucagaacau

SEQ ID NO: 2544 - RNA, 21 nt, Artificial Sequence
  source: /note="Description of Artificial Sequence: Synthetic oligonucleotide"
uguucugaaagcucuggcucu

SEQ ID NO: 2545 - RNA, 23 nt, Artificial Sequence
  source: /note="Description of Artificial Sequence: Synthetic oligonucleotide"
agagccagagcuuucagaacauc

SEQ ID NO: 2546 - RNA, 21 nt, Artificial Sequence
  source: /note="Description of Artificial Sequence: Synthetic oligonucleotide"
cagccacuauugauguucugc

SEQ ID NO: 2547 - RNA, 23 nt, Artificial Sequence
  source: /note="Description of Artificial Sequence: Synthetic oligonucleotide"
gcagaacaucaauaguggcuggc

SEQ ID NO: 2548 - RNA, 21 nt, Artificial Sequence
  source: /note="Description of Artificial Sequence: Synthetic oligonucleotide"
agccacuauugauguucugcc

SEQ ID NO: 2549 - RNA, 23 nt, Artificial Sequence
  source: /note="Description of Artificial Sequence: Synthetic oligonucleotide"
ggcagaacaucaauaguggcugg

SEQ ID NO: 2550 - RNA, 21 nt, Artificial Sequence
  source: /note="Description of Artificial Sequence: Synthetic oligonucleotide"
gugccagccacuauugauguu

SEQ ID NO: 2551 - RNA, 23 nt, Artificial Sequence
  source: /note="Description of Artificial Sequence: Synthetic oligonucleotide"
aacaucaauaguggcuggcaccc

SEQ ID NO: 2552 - RNA, 21 nt, Artificial Sequence
  source: /note="Description of Artificial Sequence: Synthetic oligonucleotide"
ggugccagccacuauugaugu

SEQ ID NO: 2553 - RNA, 23 nt, Artificial Sequence
  source: /note="Description of Artificial Sequence: Synthetic oligonucleotide"
acaucaauaguggcuggcacccc

SEQ ID NO: 2554 - RNA, 21 nt, Artificial Sequence
  source: /note="Description of Artificial Sequence: Synthetic oligonucleotide"
acaaggaccgagaagucacca

SEQ ID NO: 2555 - RNA, 23 nt, Artificial Sequence
  source: /note="Description of Artificial Sequence: Synthetic oligonucleotide"
uggugacuucucgguccuuguag

SEQ ID NO: 2556 - RNA, 21 nt, Artificial Sequence
  source: /note="Description of Artificial Sequence: Synthetic oligonucleotide"
caaggaccgagaagucaccaa

SEQ ID NO: 2557 - RNA, 23 nt, Artificial Sequence
  source: /note="Description of Artificial Sequence: Synthetic oligonucleotide"
uuggugacuucucgguccuugua

SEQ ID NO: 2558 - RNA, 21 nt, Artificial Sequence
  source: /note="Description of Artificial Sequence: Synthetic oligonucleotide"
aucuacaaggaccgagaaguc

SEQ ID NO: 2559 - RNA, 23 nt, Artificial Sequence
  source: /note="Description of Artificial Sequence: Synthetic oligonucleotide"
gacuucucgguccuuguagauau

SEQ ID NO: 2560 - RNA, 21 nt, Artificial Sequence
  source: /note="Description of Artificial Sequence: Synthetic oligonucleotide"
uaucuacaaggaccgagaagu

SEQ ID NO: 2561 - RNA, 23 nt, Artificial Sequence
  source: /note="Description of Artificial Sequence: Synthetic oligonucleotide"
acuucucgguccuuguagauaua

SEQ ID NO: 2562 - RNA, 21 nt, Artificial Sequence
  source: /note="Description of Artificial Sequence: Synthetic oligonucleotide"
cagaaugugaaagucaucgac

SEQ ID NO: 2563 - RNA, 23 nt, Artificial Sequence
  source: /note="Description of Artificial Sequence: Synthetic oligonucleotide"
gucgaugacuuucacauucuggc

SEQ ID NO: 2564 - RNA, 21 nt, Artificial Sequence
  source: /note="Description of Artificial Sequence: Synthetic oligonucleotide"
agaaugugaaagucaucgaca

SEQ ID NO: 2565 - RNA, 23 nt, Artificial Sequence
  source: /note="Description of Artificial Sequence: Synthetic oligonucleotide"
ugucgaugacuuucacauucugg

SEQ ID NO: 2566 - RNA, 21 nt, Artificial Sequence
  source: /note="Description of Artificial Sequence: Synthetic oligonucleotide"
gugccagaaugugaaagucau

SEQ ID NO: 2567 - RNA, 23 nt, Artificial Sequence
  source: /note="Description of Artificial Sequence: Synthetic oligonucleotide"
augacuuucacauucuggcaccc

SEQ ID NO: 2568 - RNA, 21 nt, Artificial Sequence
  source: /note="Description of Artificial Sequence: Synthetic oligonucleotide"
ggugccagaaugugaaaguca

SEQ ID NO: 2569 - RNA, 23 nt, Artificial Sequence
  source: /note="Description of Artificial Sequence: Synthetic oligonucleotide"
ugacuuucacauucuggcaccca

SEQ ID NO: 2570 - RNA, 21 nt, Artificial Sequence
  source: /note="Description of Artificial Sequence: Synthetic oligonucleotide"
agauguccucgagauacuaaa

SEQ ID NO: 2571 - RNA, 23 nt, Artificial Sequence
  source: /note="Description of Artificial Sequence: Synthetic oligonucleotide"
uuuaguaucucgaggacaucuug

SEQ ID NO: 2572 - RNA, 21 nt, Artificial Sequence
  source: /note="Description of Artificial Sequence: Synthetic oligonucleotide"
gauguccucgagauacuaaag

SEQ ID NO: 2573 - RNA, 23 nt, Artificial Sequence
  source: /note="Description of Artificial Sequence: Synthetic oligonucleotide"
cuuuaguaucucgaggacaucuu

SEQ ID NO: 2574 - RNA, 21 nt, Artificial Sequence
  source: /note="Description of Artificial Sequence: Synthetic oligonucleotide"
uucaagauguccucgagauac

SEQ ID NO: 2575 - RNA, 23 nt, Artificial Sequence
  source: /note="Description of Artificial Sequence: Synthetic oligonucleotide"
guaucucgaggacaucuugaaca

SEQ ID NO: 2576 - RNA, 21 nt, Artificial Sequence
  source: /note="Description of Artificial Sequence: Synthetic oligonucleotide"
guucaagauguccucgagaua

SEQ ID NO: 2577 - RNA, 23 nt, Artificial Sequence
  source: /note="Description of Artificial Sequence: Synthetic oligonucleotide"
uaucucgaggacaucuugaacac

SEQ ID NO: 2578 - RNA, 21 nt, Artificial Sequence
  source: /note="Description of Artificial Sequence: Synthetic oligonucleotide"
guggacuugcugcauaugugg

SEQ ID NO: 2579 - RNA, 23 nt, Artificial Sequence
  source: /note="Description of Artificial Sequence: Synthetic oligonucleotide"
ccacauaugcagcaaguccacug

SEQ ID NO: 2580 - RNA, 21 nt, Artificial Sequence
  source: /note="Description of Artificial Sequence: Synthetic oligonucleotide"
uggacuugcugcauauguggc

SEQ ID NO: 2581 - RNA, 23 nt, Artificial Sequence
  source: /note="Description of Artificial Sequence: Synthetic oligonucleotide"
gccacauaugcagcaaguccacu

SEQ ID NO: 2582 - RNA, 21 nt, Artificial Sequence
  source: /note="Description of Artificial Sequence: Synthetic oligonucleotide"
gacaguggacuugcugcauau

SEQ ID NO: 2583 - RNA, 23 nt, Artificial Sequence
  source: /note="Description of Artificial Sequence: Synthetic oligonucleotide"
auaugcagcaaguccacugucgu

SEQ ID NO: 2584 - RNA, 21 nt, Artificial Sequence
  source: /note="Description of Artificial Sequence: Synthetic oligonucleotide"
cgacaguggacuugcugcaua

SEQ ID NO: 2585 - RNA, 23 nt, Artificial Sequence
  source: /note="Description of Artificial Sequence: Synthetic oligonucleotide"
uaugcagcaaguccacugucguc

SEQ ID NO: 2586 - RNA, 21 nt, Artificial Sequence
  source: /note="Description of Artificial Sequence: Synthetic oligonucleotide"
aaccaguacuuuaucauuuuc

SEQ ID NO: 2587 - RNA, 23 nt, Artificial Sequence
  source: /note="Description of Artificial Sequence: Synthetic oligonucleotide"
gaaaaugauaaaguacugguuuc

SEQ ID NO: 2588 - RNA, 21 nt, Artificial Sequence
  source: /note="Description of Artificial Sequence: Synthetic oligonucleotide"
accaguacuuuaucauuuucu

SEQ ID NO: 2589 - RNA, 23 nt, Artificial Sequence
  source: /note="Description of Artificial Sequence: Synthetic oligonucleotide"
agaaaaugauaaaguacugguuu

SEQ ID NO: 2590 - RNA, 21 nt, Artificial Sequence
  source: /note="Description of Artificial Sequence: Synthetic oligonucleotide"
uugaaaccaguacuuuaucau

SEQ ID NO: 2591 - RNA, 23 nt, Artificial Sequence
  source: /note="Description of Artificial Sequence: Synthetic oligonucleotide"
augauaaaguacugguuucaaaa

SEQ ID NO: 2592 - RNA, 21 nt, Artificial Sequence
  source: /note="Description of Artificial Sequence: Synthetic oligonucleotide"
uuugaaaccaguacuuuauca

SEQ ID NO: 2593 - RNA, 23 nt, Artificial Sequence
  source: /note="Description of Artificial Sequence: Synthetic oligonucleotide"
ugauaaaguacugguuucaaaau

SEQ ID NO: 2594 - RNA, 21 nt, Artificial Sequence
  source: /note="Description of Artificial Sequence: Synthetic oligonucleotide"
cgagaagucaccaagaagcua

SEQ ID NO: 2595 - RNA, 23 nt, Artificial Sequence
  source: /note="Description of Artificial Sequence: Synthetic oligonucleotide"
uagcuucuuggugacuucucggu

SEQ ID NO: 2596 - RNA, 21 nt, Artificial Sequence
  source: /note="Description of Artificial Sequence: Synthetic oligonucleotide"
gagaagucaccaagaagcuag

SEQ ID NO: 2597 - RNA, 23 nt, Artificial Sequence
  source: /note="Description of Artificial Sequence: Synthetic oligonucleotide"
cuagcuucuuggugacuucucgg

SEQ ID NO: 2598 - RNA, 21 nt, Artificial Sequence
  source: /note="Description of Artificial Sequence: Synthetic oligonucleotide"
ggaccgagaagucaccaagaa

SEQ ID NO: 2599 - RNA, 23 nt, Artificial Sequence
  source: /note="Description of Artificial Sequence: Synthetic oligonucleotide"
uucuuggugacuucucgguccuu

SEQ ID NO: 2600 - RNA, 21 nt, Artificial Sequence
  source: /note="Description of Artificial Sequence: Synthetic oligonucleotide"
aggaccgagaagucaccaaga

SEQ ID NO: 2601 - RNA, 23 nt, Artificial Sequence
  source: /note="Description of Artificial Sequence: Synthetic oligonucleotide"
ucuuggugacuucucgguccuug

SEQ ID NO: 2602 - RNA, 21 nt, Artificial Sequence
  source: /note="Description of Artificial Sequence: Synthetic oligonucleotide"
ucaaaguguugguaaugccug

SEQ ID NO: 2603 - RNA, 23 nt, Artificial Sequence
  source: /note="Description of Artificial Sequence: Synthetic oligonucleotide"
caggcauuaccaacacuuugaac

SEQ ID NO: 2604 - RNA, 21 nt, Artificial Sequence
  source: /note="Description of Artificial Sequence: Synthetic oligonucleotide"
caaaguguugguaaugccuga

SEQ ID NO: 2605 - RNA, 23 nt, Artificial Sequence
  source: /note="Description of Artificial Sequence: Synthetic oligonucleotide"
ucaggcauuaccaacacuuugaa

SEQ ID NO: 2606 - RNA, 21 nt, Artificial Sequence
  source: /note="Description of Artificial Sequence: Synthetic oligonucleotide"
agguucaaaguguugguaaug

SEQ ID NO: 2607 - RNA, 23 nt, Artificial Sequence
  source: /note="Description of Artificial Sequence: Synthetic oligonucleotide"
cauuaccaacacuuugaaccuga

SEQ ID NO: 2608 - RNA, 21 nt, Artificial Sequence
  source: /note="Description of Artificial Sequence: Synthetic oligonucleotide"
cagguucaaaguguugguaau

SEQ ID NO: 2609 - RNA, 23 nt, Artificial Sequence
  source: /note="Description of Artificial Sequence: Synthetic oligonucleotide"
auuaccaacacuuugaaccugag

SEQ ID NO: 2610 - RNA, 21 nt, Artificial Sequence
  source: /note="Description of Artificial Sequence: Synthetic oligonucleotide"
uauuacuugacaaagagacac

SEQ ID NO: 2611 - RNA, 23 nt, Artificial Sequence
  source: /note="Description of Artificial Sequence: Synthetic oligonucleotide"
gugucucuuugucaaguaauaca

SEQ ID NO: 2612 - RNA, 21 nt, Artificial Sequence
  source: /note="Description of Artificial Sequence: Synthetic oligonucleotide"
auuacuugacaaagagacacu

SEQ ID NO: 2613 - RNA, 23 nt, Artificial Sequence
  source: /note="Description of Artificial Sequence: Synthetic oligonucleotide"
agugucucuuugucaaguaauac

SEQ ID NO: 2614 - RNA, 21 nt, Artificial Sequence
  source: /note="Description of Artificial Sequence: Synthetic oligonucleotide"
cauguauuacuugacaaagag

SEQ ID NO: 2615 - RNA, 23 nt, Artificial Sequence
  source: /note="Description of Artificial Sequence: Synthetic oligonucleotide"
cucuuugucaaguaauacaugcu

SEQ ID NO: 2616 - RNA, 21 nt, Artificial Sequence
  source: /note="Description of Artificial Sequence: Synthetic oligonucleotide"
gcauguauuacuugacaaaga

SEQ ID NO: 2617 - RNA, 23 nt, Artificial Sequence
  source: /note="Description of Artificial Sequence: Synthetic oligonucleotide"
ucuuugucaaguaauacaugcug

SEQ ID NO: 2618 - RNA, 21 nt, Artificial Sequence
  source: /note="Description of Artificial Sequence: Synthetic oligonucleotide"
aaagucaucgacaagacauug

SEQ ID NO: 2619 - RNA, 23 nt, Artificial Sequence
  source: /note="Description of Artificial Sequence: Synthetic oligonucleotide"
caaugucuugucgaugacuuuca

SEQ ID NO: 2620 - RNA, 21 nt, Artificial Sequence
  source: /note="Description of Artificial Sequence: Synthetic oligonucleotide"
aagucaucgacaagacauugg

SEQ ID NO: 2621 - RNA, 23 nt, Artificial Sequence
  source: /note="Description of Artificial Sequence: Synthetic oligonucleotide"
ccaaugucuugucgaugacuuuc

SEQ ID NO: 2622 - RNA, 21 nt, Artificial Sequence
  source: /note="Description of Artificial Sequence: Synthetic oligonucleotide"
ugugaaagucaucgacaagac

SEQ ID NO: 2623 - RNA, 23 nt, Artificial Sequence
  source: /note="Description of Artificial Sequence: Synthetic oligonucleotide"
gucuugucgaugacuuucacauu

SEQ ID NO: 2624 - RNA, 21 nt, Artificial Sequence
  source: /note="Description of Artificial Sequence: Synthetic oligonucleotide"
augugaaagucaucgacaaga

SEQ ID NO: 2625 - RNA, 23 nt, Artificial Sequence
  source: /note="Description of Artificial Sequence: Synthetic oligonucleotide"
ucuugucgaugacuuucacauuc

SEQ ID NO: 2626 - RNA, 21 nt, Artificial Sequence
  source: /note="Description of Artificial Sequence: Synthetic oligonucleotide"
auauguggcuaaagcaauaga

SEQ ID NO: 2627 - RNA, 23 nt, Artificial Sequence
  source: /note="Description of Artificial Sequence: Synthetic oligonucleotide"
ucuauugcuuuagccacauaugc

SEQ ID NO: 2628 - RNA, 21 nt, Artificial Sequence
  source: /note="Description of Artificial Sequence: Synthetic oligonucleotide"
uauguggcuaaagcaauagac

SEQ ID NO: 2629 - RNA, 23 nt, Artificial Sequence
  source: /note="Description of Artificial Sequence: Synthetic oligonucleotide"
gucuauugcuuuagccacauaug

SEQ ID NO: 2630 - RNA, 21 nt, Artificial Sequence
  source: /note="Description of Artificial Sequence: Synthetic oligonucleotide"
cugcauauguggcuaaagcaa

SEQ ID NO: 2631 - RNA, 23 nt, Artificial Sequence
  source: /note="Description of Artificial Sequence: Synthetic oligonucleotide"
uugcuuuagccacauaugcagca

SEQ ID NO: 2632 - RNA, 21 nt, Artificial Sequence
  source: /note="Description of Artificial Sequence: Synthetic oligonucleotide"
gcugcauauguggcuaaagca

SEQ ID NO: 2633 - RNA, 23 nt, Artificial Sequence
  source: /note="Description of Artificial Sequence: Synthetic oligonucleotide"
ugcuuuagccacauaugcagcaa

SEQ ID NO: 2634 - RNA, 21 nt, Artificial Sequence
  source: /note="Description of Artificial Sequence: Synthetic oligonucleotide"
agacgacaguggacuugcugc

SEQ ID NO: 2635 - RNA, 23 nt, Artificial Sequence
  source: /note="Description of Artificial Sequence: Synthetic oligonucleotide"
gcagcaaguccacugucgucucc

SEQ ID NO: 2636 - RNA, 21 nt, Artificial Sequence
  source: /note="Description of Artificial Sequence: Synthetic oligonucleotide"
gacgacaguggacuugcugca

SEQ ID NO: 2637 - RNA, 23 nt, Artificial Sequence
  source: /note="Description of Artificial Sequence: Synthetic oligonucleotide"
ugcagcaaguccacugucgucuc

SEQ ID NO: 2638 - RNA, 21 nt, Artificial Sequence
  source: /note="Description of Artificial Sequence: Synthetic oligonucleotide"
uuggagacgacaguggacuug

SEQ ID NO: 2639 - RNA, 23 nt, Artificial Sequence
  source: /note="Description of Artificial Sequence: Synthetic oligonucleotide"
caaguccacugucgucuccaaaa

SEQ ID NO: 2640 - RNA, 21 nt, Artificial Sequence
  source: /note="Description of Artificial Sequence: Synthetic oligonucleotide"
uuuggagacgacaguggacuu

SEQ ID NO: 2641 - RNA, 23 nt, Artificial Sequence
  source: /note="Description of Artificial Sequence: Synthetic oligonucleotide"
aaguccacugucgucuccaaaau

SEQ ID NO: 2642 - RNA, 21 nt, Artificial Sequence
  source: /note="Description of Artificial Sequence: Synthetic oligonucleotide"
ggccaccuccucaauugaaga

SEQ ID NO: 2643 - RNA, 23 nt, Artificial Sequence
  source: /note="Description of Artificial Sequence: Synthetic oligonucleotide"
ucuucaauugaggagguggccca

SEQ ID NO: 2644 - RNA, 21 nt, Artificial Sequence
  source: /note="Description of Artificial Sequence: Synthetic oligonucleotide"
gccaccuccucaauugaagaa

SEQ ID NO: 2645 - RNA, 23 nt, Artificial Sequence
  source: /note="Description of Artificial Sequence: Synthetic oligonucleotide"
uucuucaauugaggagguggccc

SEQ ID NO: 2646 - RNA, 21 nt, Artificial Sequence
  source: /note="Description of Artificial Sequence: Synthetic oligonucleotide"
ccugggccaccuccucaauug

SEQ ID NO: 2647 - RNA, 23 nt, Artificial Sequence
  source: /note="Description of Artificial Sequence: Synthetic oligonucleotide"
caauugaggagguggcccaggaa

SEQ ID NO: 2648 - RNA, 21 nt, Artificial Sequence
  source: /note="Description of Artificial Sequence: Synthetic oligonucleotide"
uccugggccaccuccucaauu

SEQ ID NO: 2649 - RNA, 23 nt, Artificial Sequence
  source: /note="Description of Artificial Sequence: Synthetic oligonucleotide"
aauugaggagguggcccaggaac

SEQ ID NO: 2650 - RNA, 21 nt, Artificial Sequence
  source: /note="Description of Artificial Sequence: Synthetic oligonucleotide"
uguauguuacuucuuagagag

SEQ ID NO: 2651 - RNA, 23 nt, Artificial Sequence
  source: /note="Description of Artificial Sequence: Synthetic oligonucleotide"
cucucuaagaaguaacauacauc

SEQ ID NO: 2652 - RNA, 21 nt, Artificial Sequence
  source: /note="Description of Artificial Sequence: Synthetic oligonucleotide"
guauguuacuucuuagagaga

SEQ ID NO: 2653 - RNA, 23 nt, Artificial Sequence
  source: /note="Description of Artificial Sequence: Synthetic oligonucleotide"
ucucucuaagaaguaacauacau

SEQ ID NO: 2654 - RNA, 21 nt, Artificial Sequence
  source: /note="Description of Artificial Sequence: Synthetic oligonucleotide"
aggauguauguuacuucuuag

SEQ ID NO: 2655 - RNA, 23 nt, Artificial Sequence
  source: /note="Description of Artificial Sequence: Synthetic oligonucleotide"
cuaagaaguaacauacauccuaa

SEQ ID NO: 2656 - RNA, 21 nt, Artificial Sequence
  source: /note="Description of Artificial Sequence: Synthetic oligonucleotide"
uaggauguauguuacuucuua

SEQ ID NO: 2657 - RNA, 23 nt, Artificial Sequence
  source: /note="Description of Artificial Sequence: Synthetic oligonucleotide"
uaagaaguaacauacauccuaaa

SEQ ID NO: 2658 - RNA, 21 nt, Artificial Sequence
  source: /note="Description of Artificial Sequence: Synthetic oligonucleotide"
aaauguuuuaggauguauguu

SEQ ID NO: 2659 - RNA, 23 nt, Artificial Sequence
  source: /note="Description of Artificial Sequence: Synthetic oligonucleotide"
aacauacauccuaaaacauuugg

SEQ ID NO: 2660 - RNA, 21 nt, Artificial Sequence
  source: /note="Description of Artificial Sequence: Synthetic oligonucleotide"
aauguuuuaggauguauguua

SEQ ID NO: 2661 - RNA, 23 nt, Artificial Sequence
  source: /note="Description of Artificial Sequence: Synthetic oligonucleotide"
uaacauacauccuaaaacauuug

SEQ ID NO: 2662 - RNA, 21 nt, Artificial Sequence
  source: /note="Description of Artificial Sequence: Synthetic oligonucleotide"
auccaaauguuuuaggaugua

SEQ ID NO: 2663 - RNA, 23 nt, Artificial Sequence
  source: /note="Description of Artificial Sequence: Synthetic oligonucleotide"
uacauccuaaaacauuuggauau

SEQ ID NO: 2664 - RNA, 21 nt, Artificial Sequence
  source: /note="Description of Artificial Sequence: Synthetic oligonucleotide"
uauccaaauguuuuaggaugu

SEQ ID NO: 2665 - RNA, 23 nt, Artificial Sequence
  source: /note="Description of Artificial Sequence: Synthetic oligonucleotide"
acauccuaaaacauuuggauaua

SEQ ID NO: 2666 - RNA, 21 nt, Artificial Sequence
  source: /note="Description of Artificial Sequence: Synthetic oligonucleotide"
auggguggcgguaauugguga

SEQ ID NO: 2667 - RNA, 23 nt, Artificial Sequence
  source: /note="Description of Artificial Sequence: Synthetic oligonucleotide"
ucaccaauuaccgccacccauuc

SEQ ID NO: 2668 - RNA, 21 nt, Artificial Sequence
  source: /note="Description of Artificial Sequence: Synthetic oligonucleotide"
uggguggcgguaauuggugau

SEQ ID NO: 2669 - RNA, 23 nt, Artificial Sequence
  source: /note="Description of Artificial Sequence: Synthetic oligonucleotide"
aucaccaauuaccgccacccauu

SEQ ID NO: 2670 - RNA, 21 nt, Artificial Sequence
  source: /note="Description of Artificial Sequence: Synthetic oligonucleotide"
uggaauggguggcgguaauug

SEQ ID NO: 2671 - RNA, 23 nt, Artificial Sequence
  source: /note="Description of Artificial Sequence: Synthetic oligonucleotide"
caauuaccgccacccauuccaau

SEQ ID NO: 2672 - RNA, 21 nt, Artificial Sequence
  source: /note="Description of Artificial Sequence: Synthetic oligonucleotide"
uuggaauggguggcgguaauu

SEQ ID NO: 2673 - RNA, 23 nt, Artificial Sequence
  source: /note="Description of Artificial Sequence: Synthetic oligonucleotide"
aauuaccgccacccauuccaauu

SEQ ID NO: 2674 - RNA, 21 nt, Artificial Sequence
  source: /note="Description of Artificial Sequence: Synthetic oligonucleotide"
uucaaaguguugguaaugccu

SEQ ID NO: 2675 - RNA, 23 nt, Artificial Sequence
  source: /note="Description of Artificial Sequence: Synthetic oligonucleotide"
aggcauuaccaacacuuugaacc

SEQ ID NO: 2676 - RNA, 21 nt, Artificial Sequence
  source: /note="Description of Artificial Sequence: Synthetic oligonucleotide"
ucaaaguguugguaaugccug

SEQ ID NO: 2677 - RNA, 23 nt, Artificial Sequence
  source: /note="Description of Artificial Sequence: Synthetic oligonucleotide"
caggcauuaccaacacuuugaac

SEQ ID NO: 2678 - RNA, 21 nt, Artificial Sequence
  source: /note="Description of Artificial Sequence: Synthetic oligonucleotide"
cagguucaaaguguugguaau

SEQ ID NO: 2679 - RNA, 23 nt, Artificial Sequence
  source: /note="Description of Artificial Sequence: Synthetic oligonucleotide"
auuaccaacacuuugaaccugag

SEQ ID NO: 2680 - RNA, 21 nt, Artificial Sequence
  source: /note="Description of Artificial Sequence: Synthetic oligonucleotide"
ucagguucaaaguguugguaa

SEQ ID NO: 2681 - RNA, 23 nt, Artificial Sequence
  source: /note="Description of Artificial Sequence: Synthetic oligonucleotide"
uuaccaacacuuugaaccugagc

SEQ ID NO: 2682 - RNA, 21 nt, Artificial Sequence
  source: /note="Description of Artificial Sequence: Synthetic oligonucleotide"
ccaccuccucaauugaagaag

SEQ ID NO: 2683 - RNA, 23 nt, Artificial Sequence
  source: /note="Description of Artificial Sequence: Synthetic oligonucleotide"
cuucuucaauugaggagguggcc

SEQ ID NO: 2684 - RNA, 21 nt, Artificial Sequence
  source: /note="Description of Artificial Sequence: Synthetic oligonucleotide"
caccuccucaauugaagaagu

SEQ ID NO: 2685 - RNA, 23 nt, Artificial Sequence
  source: /note="Description of Artificial Sequence: Synthetic oligonucleotide"
acuucuucaauugaggagguggc

SEQ ID NO: 2686 - RNA, 21 nt, Artificial Sequence
  source: /note="Description of Artificial Sequence: Synthetic oligonucleotide"
ugggccaccuccucaauugaa

SEQ ID NO: 2687 - RNA, 23 nt, Artificial Sequence
  source: /note="Description of Artificial Sequence: Synthetic oligonucleotide"
uucaauugaggagguggcccagg

SEQ ID NO: 2688 - RNA, 21 nt, Artificial Sequence
  source: /note="Description of Artificial Sequence: Synthetic oligonucleotide"
cugggccaccuccucaauuga

SEQ ID NO: 2689 - RNA, 23 nt, Artificial Sequence
  source: /note="Description of Artificial Sequence: Synthetic oligonucleotide"
ucaauugaggagguggcccagga

SEQ ID NO: 2690 - RNA, 21 nt, Artificial Sequence
  source: /note="Description of Artificial Sequence: Synthetic oligonucleotide"
gagugggugccagaaugugaa

SEQ ID NO: 2691 - RNA, 23 nt, Artificial Sequence
  source: /note="Description of Artificial Sequence: Synthetic oligonucleotide"
uucacauucuggcacccacucag

SEQ ID NO: 2692 - RNA, 21 nt, Artificial Sequence
  source: /note="Description of Artificial Sequence: Synthetic oligonucleotide"
agugggugccagaaugugaaa

SEQ ID NO: 2693 - RNA, 23 nt, Artificial Sequence
  source: /note="Description of Artificial Sequence: Synthetic oligonucleotide"
uuucacauucuggcacccacuca

SEQ ID NO: 2694 - RNA, 21 nt, Artificial Sequence
  source: /note="Description of Artificial Sequence: Synthetic oligonucleotide"
cucugagugggugccagaaug

SEQ ID NO: 2695 - RNA, 23 nt, Artificial Sequence
  source: /note="Description of Artificial Sequence: Synthetic oligonucleotide"
cauucuggcacccacucagagcc

SEQ ID NO: 2696 - RNA, 21 nt, Artificial Sequence
  source: /note="Description of Artificial Sequence: Synthetic oligonucleotide"
gcucugagugggugccagaau

SEQ ID NO: 2697 - RNA, 23 nt, Artificial Sequence
  source: /note="Description of Artificial Sequence: Synthetic oligonucleotide"
auucuggcacccacucagagcca

SEQ ID NO: 2698 - RNA, 21 nt, Artificial Sequence
  source: /note="Description of Artificial Sequence: Synthetic oligonucleotide"
gcacugauguucugaaagcuc

SEQ ID NO: 2699 - RNA, 23 nt, Artificial Sequence
  source: /note="Description of Artificial Sequence: Synthetic oligonucleotide"
gagcuuucagaacaucagugccu

SEQ ID NO: 2700 - RNA, 21 nt, Artificial Sequence
  source: /note="Description of Artificial Sequence: Synthetic oligonucleotide"
cacugauguucugaaagcucu

SEQ ID NO: 2701 - RNA, 23 nt, Artificial Sequence
  source: /note="Description of Artificial Sequence: Synthetic oligonucleotide"
agagcuuucagaacaucagugcc

SEQ ID NO: 2702 - RNA, 21 nt, Artificial Sequence
  source: /note="Description of Artificial Sequence: Synthetic oligonucleotide"
aaaggcacugauguucugaaa

SEQ ID NO: 2703 - RNA, 23 nt, Artificial Sequence
  source: /note="Description of Artificial Sequence: Synthetic oligonucleotide"
uuucagaacaucagugccuuucc

SEQ ID NO: 2704 - RNA, 21 nt, Artificial Sequence
  source: /note="Description of Artificial Sequence: Synthetic oligonucleotide"
gaaaggcacugauguucugaa

SEQ ID NO: 2705 - RNA, 23 nt, Artificial Sequence
  source: /note="Description of Artificial Sequence: Synthetic oligonucleotide"
uucagaacaucagugccuuuccg

SEQ ID NO: 2706 - RNA, 21 nt, Artificial Sequence
  source: /note="Description of Artificial Sequence: Synthetic oligonucleotide"
gggaagguggaagucuuccug

SEQ ID NO: 2707 - RNA, 23 nt, Artificial Sequence
  source: /note="Description of Artificial Sequence: Synthetic oligonucleotide"
caggaagacuuccaccuucccuu

SEQ ID NO: 2708 - RNA, 21 nt, Artificial Sequence
  source: /note="Description of Artificial Sequence: Synthetic oligonucleotide"
ggaagguggaagucuuccugg

SEQ ID NO: 2709 - RNA, 23 nt, Artificial Sequence
  source: /note="Description of Artificial Sequence: Synthetic oligonucleotide"
ccaggaagacuuccaccuucccu

SEQ ID NO: 2710 - RNA, 21 nt, Artificial Sequence
  source: /note="Description of Artificial Sequence: Synthetic oligonucleotide"
ggaagggaagguggaagucuu

SEQ ID NO: 2711 - RNA, 23 nt, Artificial Sequence
  source: /note="Description of Artificial Sequence: Synthetic oligonucleotide"
aagacuuccaccuucccuuccac

SEQ ID NO: 2712 - RNA, 21 nt, Artificial Sequence
  source: /note="Description of Artificial Sequence: Synthetic oligonucleotide"
uggaagggaagguggaagucu

SEQ ID NO: 2713 - RNA, 23 nt, Artificial Sequence
  source: /note="Description of Artificial Sequence: Synthetic oligonucleotide"
agacuuccaccuucccuuccaca

SEQ ID NO: 2714 - RNA, 21 nt, Artificial Sequence
  source: /note="Description of Artificial Sequence: Synthetic oligonucleotide"
ugcuaaaucaguacuuccaaa

SEQ ID NO: 2715 - RNA, 23 nt, Artificial Sequence
  source: /note="Description of Artificial Sequence: Synthetic oligonucleotide"
uuuggaaguacugauuuagcaug

SEQ ID NO: 2716 - RNA, 21 nt, Artificial Sequence
  source: /note="Description of Artificial Sequence: Synthetic oligonucleotide"
gcuaaaucaguacuuccaaag

SEQ ID NO: 2717 - RNA, 23 nt, Artificial Sequence
  source: /note="Description of Artificial Sequence: Synthetic oligonucleotide"
cuuuggaaguacugauuuagcau

SEQ ID NO: 2718 - RNA, 21 nt, Artificial Sequence
  source: /note="Description of Artificial Sequence: Synthetic oligonucleotide"
aacaugcuaaaucaguacuuc

SEQ ID NO: 2719 - RNA, 23 nt, Artificial Sequence
  source: /note="Description of Artificial Sequence: Synthetic oligonucleotide"
gaaguacugauuuagcauguugu

SEQ ID NO: 2720 - RNA, 21 nt, Artificial Sequence
  source: /note="Description of Artificial Sequence: Synthetic oligonucleotide"
caacaugcuaaaucaguacuu

SEQ ID NO: 2721 - RNA, 23 nt, Artificial Sequence
  source: /note="Description of Artificial Sequence: Synthetic oligonucleotide"
aaguacugauuuagcauguuguu

SEQ ID NO: 2722 - RNA, 21 nt, Artificial Sequence
  source: /note="Description of Artificial Sequence: Synthetic oligonucleotide"
ccacaacucaggaugaaaaau

SEQ ID NO: 2723 - RNA, 23 nt, Artificial Sequence
  source: /note="Description of Artificial Sequence: Synthetic oligonucleotide"
auuuuucauccugaguuguggcg

SEQ ID NO: 2724 - RNA, 21 nt, Artificial Sequence
  source: /note="Description of Artificial Sequence: Synthetic oligonucleotide"
cacaacucaggaugaaaaauu

SEQ ID NO: 2725 - RNA, 23 nt, Artificial Sequence
  source: /note="Description of Artificial Sequence: Synthetic oligonucleotide"
aauuuuucauccugaguuguggc

SEQ ID NO: 2726 - RNA, 21 nt, Artificial Sequence
  source: /note="Description of Artificial Sequence: Synthetic oligonucleotide"
gccgccacaacucaggaugaa

SEQ ID NO: 2727 - RNA, 23 nt, Artificial Sequence
  source: /note="Description of Artificial Sequence: Synthetic oligonucleotide"
uucauccugaguuguggcggcag

SEQ ID NO: 2728 - RNA, 21 nt, Artificial Sequence
  source: /note="Description of Artificial Sequence: Synthetic oligonucleotide"
ugccgccacaacucaggauga

SEQ ID NO: 2729 - RNA, 23 nt, Artificial Sequence
  source: /note="Description of Artificial Sequence: Synthetic oligonucleotide"
ucauccugaguuguggcggcagu

SEQ ID NO: 2730 - RNA, 21 nt, Artificial Sequence
  source: /note="Description of Artificial Sequence: Synthetic oligonucleotide"
gcaaccgucuggaugaugugc

SEQ ID NO: 2731 - RNA, 23 nt, Artificial Sequence
  source: /note="Description of Artificial Sequence: Synthetic oligonucleotide"
gcacaucauccagacgguugccc

SEQ ID NO: 2732 - RNA, 21 nt, Artificial Sequence
  source: /note="Description of Artificial Sequence: Synthetic oligonucleotide"
caaccgucuggaugaugugcg

SEQ ID NO: 2733 - RNA, 23 nt, Artificial Sequence
  source: /note="Description of Artificial Sequence: Synthetic oligonucleotide"
cgcacaucauccagacgguugcc

SEQ ID NO: 2734 - RNA, 21 nt, Artificial Sequence
  source: /note="Description of Artificial Sequence: Synthetic oligonucleotide"
cugggcaaccgucuggaugau

SEQ ID NO: 2735 - RNA, 23 nt, Artificial Sequence
  source: /note="Description of Artificial Sequence: Synthetic oligonucleotide"
aucauccagacgguugcccaggu

SEQ ID NO: 2736 - RNA, 21 nt, Artificial Sequence
  source: /note="Description of Artificial Sequence: Synthetic oligonucleotide"
ccugggcaaccgucuggauga

SEQ ID NO: 2737 - RNA, 23 nt, Artificial Sequence
  source: /note="Description of Artificial Sequence: Synthetic oligonucleotide"
ucauccagacgguugcccaggua

SEQ ID NO: 2738 - RNA, 21 nt, Artificial Sequence
  source: /note="Description of Artificial Sequence: Synthetic oligonucleotide"
gcaaaugaugaagaaacuuug

SEQ ID NO: 2739 - RNA, 23 nt, Artificial Sequence
  source: /note="Description of Artificial Sequence: Synthetic oligonucleotide"
caaaguuucuucaucauuugccc

SEQ ID NO: 2740 - RNA, 21 nt, Artificial Sequence
  source: /note="Description of Artificial Sequence: Synthetic oligonucleotide"
caaaugaugaagaaacuuugg

SEQ ID NO: 2741 - RNA, 23 nt, Artificial Sequence
  source: /note="Description of Artificial Sequence: Synthetic oligonucleotide"
ccaaaguuucuucaucauuugcc

SEQ ID NO: 2742 - RNA, 21 nt, Artificial Sequence
  source: /note="Description of Artificial Sequence: Synthetic oligonucleotide"
uggggcaaaugaugaagaaac

SEQ ID NO: 2743 - RNA, 23 nt, Artificial Sequence
  source: /note="Description of Artificial Sequence: Synthetic oligonucleotide"
guuucuucaucauuugccccaga

SEQ ID NO: 2744 - RNA, 21 nt, Artificial Sequence
  source: /note="Description of Artificial Sequence: Synthetic oligonucleotide"
cuggggcaaaugaugaagaaa

SEQ ID NO: 2745 - RNA, 23 nt, Artificial Sequence
  source: /note="Description of Artificial Sequence: Synthetic oligonucleotide"
uuucuucaucauuugccccagac

SEQ ID NO: 2746 - RNA, 21 nt, Artificial Sequence
  source: /note="Description of Artificial Sequence: Synthetic oligonucleotide"
ccaaggcuguguuugugggga

SEQ ID NO: 2747 - RNA, 23 nt, Artificial Sequence
  source: /note="Description of Artificial Sequence: Synthetic oligonucleotide"
uccccacaaacacagccuuggcg

SEQ ID NO: 2748 - RNA, 21 nt, Artificial Sequence
  source: /note="Description of Artificial Sequence: Synthetic oligonucleotide"
caaggcuguguuuguggggag

SEQ ID NO: 2749 - RNA, 23 nt, Artificial Sequence
  source: /note="Description of Artificial Sequence: Synthetic oligonucleotide"
cuccccacaaacacagccuuggc

SEQ ID NO: 2750 - RNA, 21 nt, Artificial Sequence
  source: /note="Description of Artificial Sequence: Synthetic oligonucleotide"
ggcgccaaggcuguguuugug

SEQ ID NO: 2751 - RNA, 23 nt, Artificial Sequence
  source: /note="Description of Artificial Sequence: Synthetic oligonucleotide"
cacaaacacagccuuggcgccaa

SEQ ID NO: 2752 - RNA, 21 nt, Artificial Sequence
  source: /note="Description of Artificial Sequence: Synthetic oligonucleotide"
uggcgccaaggcuguguuugu

SEQ ID NO: 2753 - RNA, 23 nt, Artificial Sequence
  source: /note="Description of Artificial Sequence: Synthetic oligonucleotide"
acaaacacagccuuggcgccaag

SEQ ID NO: 2754 - RNA, 21 nt, Artificial Sequence
  source: /note="Description of Artificial Sequence: Synthetic oligonucleotide"
acugccgccacaacucaggau

SEQ ID NO: 2755 - RNA, 23 nt, Artificial Sequence
  source: /note="Description of Artificial Sequence: Synthetic oligonucleotide"
auccugaguuguggcggcaguuu

SEQ ID NO: 2756 - RNA, 21 nt, Artificial Sequence
  source: /note="Description of Artificial Sequence: Synthetic oligonucleotide"
cugccgccacaacucaggaug

SEQ ID NO: 2757 - RNA, 23 nt, Artificial Sequence
  source: /note="Description of Artificial Sequence: Synthetic oligonucleotide"
cauccugaguuguggcggcaguu

SEQ ID NO: 2758 - RNA, 21 nt, Artificial Sequence
  source: /note="Description of Artificial Sequence: Synthetic oligonucleotide"
ucaaacugccgccacaacuca

SEQ ID NO: 2759 - RNA, 23 nt, Artificial Sequence
  source: /note="Description of Artificial Sequence: Synthetic oligonucleotide"
ugaguuguggcggcaguuugaau

SEQ ID NO: 2760 - RNA, 21 nt, Artificial Sequence
  source: /note="Description of Artificial Sequence: Synthetic oligonucleotide"
uucaaacugccgccacaacuc

SEQ ID NO: 2761 - RNA, 23 nt, Artificial Sequence
  source: /note="Description of Artificial Sequence: Synthetic oligonucleotide"
gaguuguggcggcaguuugaauc

SEQ ID NO: 2762 - RNA, 21 nt, Artificial Sequence
  source: /note="Description of Artificial Sequence: Synthetic oligonucleotide"
gggaagauaucaaauggcuga

SEQ ID NO: 2763 - RNA, 23 nt, Artificial Sequence
  source: /note="Description of Artificial Sequence: Synthetic oligonucleotide"
ucagccauuugauaucuucccag

SEQ ID NO: 2764 - RNA, 21 nt, Artificial Sequence
  source: /note="Description of Artificial Sequence: Synthetic oligonucleotide"
ggaagauaucaaauggcugag

SEQ ID NO: 2765 - RNA, 23 nt, Artificial Sequence
  source: /note="Description of Artificial Sequence: Synthetic oligonucleotide"
cucagccauuugauaucuuccca

SEQ ID NO: 2766 - RNA, 21 nt, Artificial Sequence
  source: /note="Description of Artificial Sequence: Synthetic oligonucleotide"
agcugggaagauaucaaaugg

SEQ ID NO: 2767 - RNA, 23 nt, Artificial Sequence
  source: /note="Description of Artificial Sequence: Synthetic oligonucleotide"
ccauuugauaucuucccagcuga

SEQ ID NO: 2768 - RNA, 21 nt, Artificial Sequence
  source: /note="Description of Artificial Sequence: Synthetic oligonucleotide"
cagcugggaagauaucaaaug

SEQ ID NO: 2769 - RNA, 23 nt, Artificial Sequence
  source: /note="Description of Artificial Sequence: Synthetic oligonucleotide"
cauuugauaucuucccagcugau

SEQ ID NO: 2770 - RNA, 21 nt, Artificial Sequence
  source: /note="Description of Artificial Sequence: Synthetic oligonucleotide"
aaucaguacuuccaaagucua

SEQ ID NO: 2771 - RNA, 23 nt, Artificial Sequence
  source: /note="Description of Artificial Sequence: Synthetic oligonucleotide"
uagacuuuggaaguacugauuua

SEQ ID NO: 2772 - RNA, 21 nt, Artificial Sequence
  source: /note="Description of Artificial Sequence: Synthetic oligonucleotide"
aucaguacuuccaaagucuau

SEQ ID NO: 2773 - RNA, 23 nt, Artificial Sequence
  source: /note="Description of Artificial Sequence: Synthetic oligonucleotide"
auagacuuuggaaguacugauuu

SEQ ID NO: 2774 - RNA, 21 nt, Artificial Sequence
  source: /note="Description of Artificial Sequence: Synthetic oligonucleotide"
gcuaaaucaguacuuccaaag

SEQ ID NO: 2775 - RNA, 23 nt, Artificial Sequence
  source: /note="Description of Artificial Sequence: Synthetic oligonucleotide"
cuuuggaaguacugauuuagcau

SEQ ID NO: 2776 - RNA, 21 nt, Artificial Sequence
  source: /note="Description of Artificial Sequence: Synthetic oligonucleotide"
ugcuaaaucaguacuuccaaa

SEQ ID NO: 2777 - RNA, 23 nt, Artificial Sequence
  source: /note="Description of Artificial Sequence: Synthetic oligonucleotide"
uuuggaaguacugauuuagcaug

SEQ ID NO: 2778 - RNA, 21 nt, Artificial Sequence
  source: /note="Description of Artificial Sequence: Synthetic oligonucleotide"
ucagcaugccaauaugugugg

SEQ ID NO: 2779 - RNA, 23 nt, Artificial Sequence
  source: /note="Description of Artificial Sequence: Synthetic oligonucleotide"
ccacacauauuggcaugcugacc

SEQ ID NO: 2780 - RNA, 21 nt, Artificial Sequence
  source: /note="Description of Artificial Sequence: Synthetic oligonucleotide"
cagcaugccaauauguguggg

SEQ ID NO: 2781 - RNA, 23 nt, Artificial Sequence
  source: /note="Description of Artificial Sequence: Synthetic oligonucleotide"
cccacacauauuggcaugcugac

SEQ ID NO: 2782 - RNA, 21 nt, Artificial Sequence
  source: /note="Description of Artificial Sequence: Synthetic oligonucleotide"
agggucagcaugccaauaugu

SEQ ID NO: 2783 - RNA, 23 nt, Artificial Sequence
  source: /note="Description of Artificial Sequence: Synthetic oligonucleotide"
acauauuggcaugcugacccucu

SEQ ID NO: 2784 - RNA, 21 nt, Artificial Sequence
  source: /note="Description of Artificial Sequence: Synthetic oligonucleotide"
gagggucagcaugccaauaug

SEQ ID NO: 2785 - RNA, 23 nt, Artificial Sequence
  source: /note="Description of Artificial Sequence: Synthetic oligonucleotide"
cauauuggcaugcugacccucug

SEQ ID NO: 2786 - RNA, 21 nt, Artificial Sequence
  source: /note="Description of Artificial Sequence: Synthetic oligonucleotide"
gcauauguggcuaaagcaaua

SEQ ID NO: 2787 - RNA, 23 nt, Artificial Sequence
  source: /note="Description of Artificial Sequence: Synthetic oligonucleotide"
uauugcuuuagccacauaugcag

SEQ ID NO: 2788 - RNA, 21 nt, Artificial Sequence
  source: /note="Description of Artificial Sequence: Synthetic oligonucleotide"
cauauguggcuaaagcaauag

SEQ ID NO: 2789 - RNA, 23 nt, Artificial Sequence
  source: /note="Description of Artificial Sequence: Synthetic oligonucleotide"
cuauugcuuuagccacauaugca

SEQ ID NO: 2790 - RNA, 21 nt, Artificial Sequence
  source: /note="Description of Artificial Sequence: Synthetic oligonucleotide"
ugcugcauauguggcuaaagc

SEQ ID NO: 2791 - RNA, 23 nt, Artificial Sequence
  source: /note="Description of Artificial Sequence: Synthetic oligonucleotide"
gcuuuagccacauaugcagcaag

SEQ ID NO: 2792 - RNA, 21 nt, Artificial Sequence
  source: /note="Description of Artificial Sequence: Synthetic oligonucleotide"
uugcugcauauguggcuaaag

SEQ ID NO: 2793 - RNA, 23 nt, Artificial Sequence
  source: /note="Description of Artificial Sequence: Synthetic oligonucleotide"
cuuuagccacauaugcagcaagu

SEQ ID NO: 2794 - RNA, 21 nt, Artificial Sequence
  source: /note="Description of Artificial Sequence: Synthetic oligonucleotide"
aaaugaugaagaaacuuuggc

SEQ ID NO: 2795 - RNA, 23 nt, Artificial Sequence
  source: /note="Description of Artificial Sequence: Synthetic oligonucleotide"
gccaaaguuucuucaucauuugc

SEQ ID NO: 2796 - RNA, 21 nt, Artificial Sequence
  source: /note="Description of Artificial Sequence: Synthetic oligonucleotide"
aaugaugaagaaacuuuggcu

SEQ ID NO: 2797 - RNA, 23 nt, Artificial Sequence
  source: /note="Description of Artificial Sequence: Synthetic oligonucleotide"
agccaaaguuucuucaucauuug

SEQ ID NO: 2798 - RNA, 21 nt, Artificial Sequence
  source: /note="Description of Artificial Sequence: Synthetic oligonucleotide"
gggcaaaugaugaagaaacuu

SEQ ID NO: 2799 - RNA, 23 nt, Artificial Sequence
  source: /note="Description of Artificial Sequence: Synthetic oligonucleotide"
aaguuucuucaucauuugcccca

SEQ ID NO: 2800 - RNA, 21 nt, Artificial Sequence
  source: /note="Description of Artificial Sequence: Synthetic oligonucleotide"
ggggcaaaugaugaagaaacu

SEQ ID NO: 2801 - RNA, 23 nt, Artificial Sequence
  source: /note="Description of Artificial Sequence: Synthetic oligonucleotide"
aguuucuucaucauuugccccag

SEQ ID NO: 2802 - RNA, 21 nt, Artificial Sequence
  source: /note="Description of Artificial Sequence: Synthetic oligonucleotide"
gagauacuaaaggaagaauuc

SEQ ID NO: 2803 - RNA, 23 nt, Artificial Sequence
  source: /note="Description of Artificial Sequence: Synthetic oligonucleotide"
gaauucuuccuuuaguaucucga

SEQ ID NO: 2804 - RNA, 21 nt, Artificial Sequence
  source: /note="Description of Artificial Sequence: Synthetic oligonucleotide"
agauacuaaaggaagaauucc

SEQ ID NO: 2805 - RNA, 23 nt, Artificial Sequence
  source: /note="Description of Artificial Sequence: Synthetic oligonucleotide"
ggaauucuuccuuuaguaucucg

SEQ ID NO: 2806 - RNA, 21 nt, Artificial Sequence
  source: /note="Description of Artificial Sequence: Synthetic oligonucleotide"
ccucgagauacuaaaggaaga

SEQ ID NO: 2807 - RNA, 23 nt, Artificial Sequence
  source: /note="Description of Artificial Sequence: Synthetic oligonucleotide"
ucuuccuuuaguaucucgaggac

SEQ ID NO: 2808 - RNA, 21 nt, Artificial Sequence
  source: /note="Description of Artificial Sequence: Synthetic oligonucleotide"
uccucgagauacuaaaggaag

SEQ ID NO: 2809 - RNA, 23 nt, Artificial Sequence
  source: /note="Description of Artificial Sequence: Synthetic oligonucleotide"
cuuccuuuaguaucucgaggaca

SEQ ID NO: 2810 - RNA, 21 nt, Artificial Sequence
  source: /note="Description of Artificial Sequence: Synthetic oligonucleotide"
acaacucaggaugaaaaauuu

SEQ ID NO: 2811 - RNA, 23 nt, Artificial Sequence
  source: /note="Description of Artificial Sequence: Synthetic oligonucleotide"
aaauuuuucauccugaguugugg

SEQ ID NO: 2812 - RNA, 21 nt, Artificial Sequence
  source: /note="Description of Artificial Sequence: Synthetic oligonucleotide"
caacucaggaugaaaaauuuu

SEQ ID NO: 2813 - RNA, 23 nt, Artificial Sequence
  source: /note="Description of Artificial Sequence: Synthetic oligonucleotide"
aaaauuuuucauccugaguugug

SEQ ID NO: 2814 - RNA, 21 nt, Artificial Sequence
  source: /note="Description of Artificial Sequence: Synthetic oligonucleotide"
cgccacaacucaggaugaaaa

SEQ ID NO: 2815 - RNA, 23 nt, Artificial Sequence
  source: /note="Description of Artificial Sequence: Synthetic oligonucleotide"
uuuucauccugaguuguggcggc

SEQ ID NO: 2816 - RNA, 21 nt, Artificial Sequence
  source: /note="Description of Artificial Sequence: Synthetic oligonucleotide"
ccgccacaacucaggaugaaa

SEQ ID NO: 2817 - RNA, 23 nt, Artificial Sequence
  source: /note="Description of Artificial Sequence: Synthetic oligonucleotide"
uuucauccugaguuguggcggca

SEQ ID NO: 2818 - RNA, 21 nt, Artificial Sequence
  source: /note="Description of Artificial Sequence: Synthetic oligonucleotide"
agggaagguggaagucuuccu

SEQ ID NO: 2819 - RNA, 23 nt, Artificial Sequence
  source: /note="Description of Artificial Sequence: Synthetic oligonucleotide"
aggaagacuuccaccuucccuuc

SEQ ID NO: 2820 - RNA, 21 nt, Artificial Sequence
  source: /note="Description of Artificial Sequence: Synthetic oligonucleotide"
gggaagguggaagucuuccug

SEQ ID NO: 2821 - RNA, 23 nt, Artificial Sequence
  source: /note="Description of Artificial Sequence: Synthetic oligonucleotide"
caggaagacuuccaccuucccuu

SEQ ID NO: 2822 - RNA, 21 nt, Artificial Sequence
  source: /note="Description of Artificial Sequence: Synthetic oligonucleotide"
uggaagggaagguggaagucu

SEQ ID NO: 2823 - RNA, 23 nt, Artificial Sequence
  source: /note="Description of Artificial Sequence: Synthetic oligonucleotide"
agacuuccaccuucccuuccaca

SEQ ID NO: 2824 - RNA, 21 nt, Artificial Sequence
  source: /note="Description of Artificial Sequence: Synthetic oligonucleotide"
guggaagggaagguggaaguc

SEQ ID NO: 2825 - RNA, 23 nt, Artificial Sequence
  source: /note="Description of Artificial Sequence: Synthetic oligonucleotide"
gacuuccaccuucccuuccacag

SEQ ID NO: 2826 - RNA, 21 nt, Artificial Sequence
  source: /note="Description of Artificial Sequence: Synthetic oligonucleotide"
ggcgagcuugccacugugaga

SEQ ID NO: 2827 - RNA, 23 nt, Artificial Sequence
  source: /note="Description of Artificial Sequence: Synthetic oligonucleotide"
ucucacaguggcaagcucgccgu

SEQ ID NO: 2828 - RNA, 21 nt, Artificial Sequence
  source: /note="Description of Artificial Sequence: Synthetic oligonucleotide"
gcgagcuugccacugugagag

SEQ ID NO: 2829 - RNA, 23 nt, Artificial Sequence
  source: /note="Description of Artificial Sequence: Synthetic oligonucleotide"
cucucacaguggcaagcucgccg

SEQ ID NO: 2830 - RNA, 21 nt, Artificial Sequence
  source: /note="Description of Artificial Sequence: Synthetic oligonucleotide"
ggacggcgagcuugccacugu

SEQ ID NO: 2831 - RNA, 23 nt, Artificial Sequence
  source: /note="Description of Artificial Sequence: Synthetic oligonucleotide"
acaguggcaagcucgccguccac

SEQ ID NO: 2832 - RNA, 21 nt, Artificial Sequence
  source: /note="Description of Artificial Sequence: Synthetic oligonucleotide"
uggacggcgagcuugccacug

SEQ ID NO: 2833 - RNA, 23 nt, Artificial Sequence
  source: /note="Description of Artificial Sequence: Synthetic oligonucleotide"
caguggcaagcucgccguccaca

SEQ ID NO: 2834 - RNA, 21 nt, Artificial Sequence
  source: /note="Description of Artificial Sequence: Synthetic oligonucleotide"
augugcguaacagauucaaac

SEQ ID NO: 2835 - RNA, 23 nt, Artificial Sequence
  source: /note="Description of Artificial Sequence: Synthetic oligonucleotide"
guuugaaucuguuacgcacauca

SEQ ID NO: 2836 - RNA, 21 nt, Artificial Sequence
  source: /note="Description of Artificial Sequence: Synthetic oligonucleotide"
ugugcguaacagauucaaacu

SEQ ID NO: 2837 - RNA, 23 nt, Artificial Sequence
  source: /note="Description of Artificial Sequence: Synthetic oligonucleotide"
aguuugaaucuguuacgcacauc

SEQ ID NO: 2838 - RNA, 21 nt, Artificial Sequence
  source: /note="Description of Artificial Sequence: Synthetic oligonucleotide"
gaugaugugcguaacagauuc

SEQ ID NO: 2839 - RNA, 23 nt, Artificial Sequence
  source: /note="Description of Artificial Sequence: Synthetic oligonucleotide"
gaaucuguuacgcacaucaucca

SEQ ID NO: 2840 - RNA, 21 nt, Artificial Sequence
  source: /note="Description of Artificial Sequence: Synthetic oligonucleotide"
ggaugaugugcguaacagauu

SEQ ID NO: 2841 - RNA, 23 nt, Artificial Sequence
  source: /note="Description of Artificial Sequence: Synthetic oligonucleotide"
aaucuguuacgcacaucauccag

SEQ ID NO: 2842 - RNA, 21 nt, Artificial Sequence
  source: /note="Description of Artificial Sequence: Synthetic oligonucleotide"
gggucagcaugccaauaugug

SEQ ID NO: 2843 - RNA, 23 nt, Artificial Sequence
  source: /note="Description of Artificial Sequence: Synthetic oligonucleotide"
cacauauuggcaugcugacccuc

SEQ ID NO: 2844 - RNA, 21 nt, Artificial Sequence
  source: /note="Description of Artificial Sequence: Synthetic oligonucleotide"
ggucagcaugccaauaugugu

SEQ ID NO: 2845 - RNA, 23 nt, Artificial Sequence
  source: /note="Description of Artificial Sequence: Synthetic oligonucleotide"
acacauauuggcaugcugacccu

SEQ ID NO: 2846 - RNA, 21 nt, Artificial Sequence
  source: /note="Description of Artificial Sequence: Synthetic oligonucleotide"
cagagggucagcaugccaaua

SEQ ID NO: 2847 - RNA, 23 nt, Artificial Sequence
  source: /note="Description of Artificial Sequence: Synthetic oligonucleotide"
uauuggcaugcugacccucuguc

SEQ ID NO: 2848 - RNA, 21 nt, Artificial Sequence
  source: /note="Description of Artificial Sequence: Synthetic oligonucleotide"
acagagggucagcaugccaau

SEQ ID NO: 2849 - RNA, 23 nt, Artificial Sequence
  source: /note="Description of Artificial Sequence: Synthetic oligonucleotide"
auuggcaugcugacccucugucc

SEQ ID NO: 2850 - RNA, 21 nt, Artificial Sequence
  source: /note="Description of Artificial Sequence: Synthetic oligonucleotide"
gcuugaaugggaucuuggugu

SEQ ID NO: 2851 - RNA, 23 nt, Artificial Sequence
  source: /note="Description of Artificial Sequence: Synthetic oligonucleotide"
acaccaagaucccauucaagcca

SEQ ID NO: 2852 - RNA, 21 nt, Artificial Sequence
  source: /note="Description of Artificial Sequence: Synthetic oligonucleotide"
cuugaaugggaucuugguguc

SEQ ID NO: 2853 - RNA, 23 nt, Artificial Sequence
  source: /note="Description of Artificial Sequence: Synthetic oligonucleotide"
gacaccaagaucccauucaagcc

SEQ ID NO: 2854 - RNA, 21 nt, Artificial Sequence
  source: /note="Description of Artificial Sequence: Synthetic oligonucleotide"
cauggcuugaaugggaucuug

SEQ ID NO: 2855 - RNA, 23 nt, Artificial Sequence
  source: /note="Description of Artificial Sequence: Synthetic oligonucleotide"
caagaucccauucaagccauguu

SEQ ID NO: 2856 - RNA, 21 nt, Artificial Sequence
  source: /note="Description of Artificial Sequence: Synthetic oligonucleotide"
acauggcuugaaugggaucuu

SEQ ID NO: 2857 - RNA, 23 nt, Artificial Sequence
  source: /note="Description of Artificial Sequence: Synthetic oligonucleotide"
aagaucccauucaagccauguuu

SEQ ID NO: 2858 - RNA, 21 nt, Artificial Sequence
  source: /note="Description of Artificial Sequence: Synthetic oligonucleotide"
ucaaauggcugagaagacuga

SEQ ID NO: 2859 - RNA, 23 nt, Artificial Sequence
  source: /note="Description of Artificial Sequence: Synthetic oligonucleotide"
ucagucuucucagccauuugaua

SEQ ID NO: 2860 - RNA, 21 nt, Artificial Sequence
  source: /note="Description of Artificial Sequence: Synthetic oligonucleotide"
caaauggcugagaagacugac

SEQ ID NO: 2861 - RNA, 23 nt, Artificial Sequence
  source: /note="Description of Artificial Sequence: Synthetic oligonucleotide"
gucagucuucucagccauuugau

SEQ ID NO: 2862 - RNA, 21 nt, Artificial Sequence
  source: /note="Description of Artificial Sequence: Synthetic oligonucleotide"
gauaucaaauggcugagaaga

SEQ ID NO: 2863 - RNA, 23 nt, Artificial Sequence
  source: /note="Description of Artificial Sequence: Synthetic oligonucleotide"
ucuucucagccauuugauaucuu

SEQ ID NO: 2864 - RNA, 21 nt, Artificial Sequence
  source: /note="Description of Artificial Sequence: Synthetic oligonucleotide"
agauaucaaauggcugagaag

SEQ ID NO: 2865 - RNA, 23 nt, Artificial Sequence
  source: /note="Description of Artificial Sequence: Synthetic oligonucleotide"
cuucucagccauuugauaucuuc

SEQ ID NO: 2866 - RNA, 21 nt, Artificial Sequence
  source: /note="Description of Artificial Sequence: Synthetic oligonucleotide"
gaaagucaucgacaagacauu

SEQ ID NO: 2867 - RNA, 23 nt, Artificial Sequence
  source: /note="Description of Artificial Sequence: Synthetic oligonucleotide"
aaugucuugucgaugacuuucac

SEQ ID NO: 2868 - RNA, 21 nt, Artificial Sequence
  source: /note="Description of Artificial Sequence: Synthetic oligonucleotide"
aaagucaucgacaagacauug

SEQ ID NO: 2869 - RNA, 23 nt, Artificial Sequence
  source: /note="Description of Artificial Sequence: Synthetic oligonucleotide"
caaugucuugucgaugacuuuca

SEQ ID NO: 2870 - RNA, 21 nt, Artificial Sequence
  source: /note="Description of Artificial Sequence: Synthetic oligonucleotide"
augugaaagucaucgacaaga

SEQ ID NO: 2871 - RNA, 23 nt, Artificial Sequence
  source: /note="Description of Artificial Sequence: Synthetic oligonucleotide"
ucuugucgaugacuuucacauuc

SEQ ID NO: 2872 - RNA, 21 nt, Artificial Sequence
  source: /note="Description of Artificial Sequence: Synthetic oligonucleotide"
aaugugaaagucaucgacaag

SEQ ID NO: 2873 - RNA, 23 nt, Artificial Sequence
  source: /note="Description of Artificial Sequence: Synthetic oligonucleotide"
cuugucgaugacuuucacauucu

SEQ ID NO: 2874 - RNA, 21 nt, Artificial Sequence
  source: /note="Description of Artificial Sequence: Synthetic oligonucleotide"
ggcuaauuuguaucaaugauu

SEQ ID NO: 2875 - RNA, 23 nt, Artificial Sequence
  source: /note="Description of Artificial Sequence: Synthetic oligonucleotide"
aaucauugauacaaauuagccgg

SEQ ID NO: 2876 - RNA, 21 nt, Artificial Sequence
  source: /note="Description of Artificial Sequence: Synthetic oligonucleotide"
gcuaauuuguaucaaugauua

SEQ ID NO: 2877 - RNA, 23 nt, Artificial Sequence
  source: /note="Description of Artificial Sequence: Synthetic oligonucleotide"
uaaucauugauacaaauuagccg

SEQ ID NO: 2878 - RNA, 21 nt, Artificial Sequence
  source: /note="Description of Artificial Sequence: Synthetic oligonucleotide"
ccccggcuaauuuguaucaau

SEQ ID NO: 2879 - RNA, 23 nt, Artificial Sequence
  source: /note="Description of Artificial Sequence: Synthetic oligonucleotide"
auugauacaaauuagccggggga

SEQ ID NO: 2880 - RNA, 21 nt, Artificial Sequence
  source: /note="Description of Artificial Sequence: Synthetic oligonucleotide"
cccccggcuaauuuguaucaa

SEQ ID NO: 2881 - RNA, 23 nt, Artificial Sequence
  source: /note="Description of Artificial Sequence: Synthetic oligonucleotide"
uugauacaaauuagccgggggag

SEQ ID NO: 2882 - RNA, 21 nt, Artificial Sequence
  source: /note="Description of Artificial Sequence: Synthetic oligonucleotide"
ugucgacuucuguuuuaggac

SEQ ID NO: 2883 - RNA, 23 nt, Artificial Sequence
  source: /note="Description of Artificial Sequence: Synthetic oligonucleotide"
guccuaaaacagaagucgacaga

SEQ ID NO: 2884 - RNA, 21 nt, Artificial Sequence
  source: /note="Description of Artificial Sequence: Synthetic oligonucleotide"
gucgacuucuguuuuaggaca

SEQ ID NO: 2885 - RNA, 23 nt, Artificial Sequence
  source: /note="Description of Artificial Sequence: Synthetic oligonucleotide"
uguccuaaaacagaagucgacag

SEQ ID NO: 2886 - RNA, 21 nt, Artificial Sequence
  source: /note="Description of Artificial Sequence: Synthetic oligonucleotide"
gaucugucgacuucuguuuua

SEQ ID NO: 2887 - RNA, 23 nt, Artificial Sequence
  source: /note="Description of Artificial Sequence: Synthetic oligonucleotide"
uaaaacagaagucgacagaucug

SEQ ID NO: 2888 - RNA, 21 nt, Artificial Sequence
  source: /note="Description of Artificial Sequence: Synthetic oligonucleotide"
agaucugucgacuucuguuuu

SEQ ID NO: 2889 - RNA, 23 nt, Artificial Sequence
  source: /note="Description of Artificial Sequence: Synthetic oligonucleotide"
aaaacagaagucgacagaucugu

SEQ ID NO: 2890 - RNA, 21 nt, Artificial Sequence
  source: /note="Description of Artificial Sequence: Synthetic oligonucleotide"
ccgagaagucaccaagaagcu

SEQ ID NO: 2891 - RNA, 23 nt, Artificial Sequence
  source: /note="Description of Artificial Sequence: Synthetic oligonucleotide"
agcuucuuggugacuucucgguc

SEQ ID NO: 2892 - RNA, 21 nt, Artificial Sequence
  source: /note="Description of Artificial Sequence: Synthetic oligonucleotide"
cgagaagucaccaagaagcua

SEQ ID NO: 2893 - RNA, 23 nt, Artificial Sequence
  source: /note="Description of Artificial Sequence: Synthetic oligonucleotide"
uagcuucuuggugacuucucggu

SEQ ID NO: 2894 - RNA, 21 nt, Artificial Sequence
  source: /note="Description of Artificial Sequence: Synthetic oligonucleotide"
aggaccgagaagucaccaaga

SEQ ID NO: 2895 - RNA, 23 nt, Artificial Sequence
  source: /note="Description of Artificial Sequence: Synthetic oligonucleotide"
ucuuggugacuucucgguccuug

SEQ ID NO: 2896 - RNA, 21 nt, Artificial Sequence
  source: /note="Description of Artificial Sequence: Synthetic oligonucleotide"
aaggaccgagaagucaccaag

SEQ ID NO: 2897 - RNA, 23 nt, Artificial Sequence
  source: /note="Description of Artificial Sequence: Synthetic oligonucleotide"
cuuggugacuucucgguccuugu

SEQ ID NO: 2898 - RNA, 21 nt, Artificial Sequence
  source: /note="Description of Artificial Sequence: Synthetic oligonucleotide"
aaacauggcuugaaugggauc

SEQ ID NO: 2899 - RNA, 23 nt, Artificial Sequence
  source: /note="Description of Artificial Sequence: Synthetic oligonucleotide"
gaucccauucaagccauguuuaa

SEQ ID NO: 2900 - RNA, 21 nt, Artificial Sequence
  source: /note="Description of Artificial Sequence: Synthetic oligonucleotide"
aacauggcuugaaugggaucu

SEQ ID NO: 2901 - RNA, 23 nt, Artificial Sequence
  source: /note="Description of Artificial Sequence: Synthetic oligonucleotide"
agaucccauucaagccauguuua

SEQ ID NO: 2902 - RNA, 21 nt, Artificial Sequence
  source: /note="Description of Artificial Sequence: Synthetic oligonucleotide"
uguuaaacauggcuugaaugg

SEQ ID NO: 2903 - RNA, 23 nt, Artificial Sequence
  source: /note="Description of Artificial Sequence: Synthetic oligonucleotide"
ccauucaagccauguuuaacagc

SEQ ID NO: 2904 - RNA, 21 nt, Artificial Sequence
  source: /note="Description of Artificial Sequence: Synthetic oligonucleotide"
cuguuaaacauggcuugaaug

SEQ ID NO: 2905 - RNA, 23 nt, Artificial Sequence
  source: /note="Description of Artificial Sequence: Synthetic oligonucleotide"
cauucaagccauguuuaacagcc

SEQ ID NO: 2906 - RNA, 21 nt, Artificial Sequence
  source: /note="Description of Artificial Sequence: Synthetic oligonucleotide"
gacuugcugcauauguggcua

SEQ ID NO: 2907 - RNA, 23 nt, Artificial Sequence
  source: /note="Description of Artificial Sequence: Synthetic oligonucleotide"
uagccacauaugcagcaagucca

SEQ ID NO: 2908 - RNA, 21 nt, Artificial Sequence
  source: /note="Description of Artificial Sequence: Synthetic oligonucleotide"
acuugcugcauauguggcuaa

SEQ ID NO: 2909 - RNA, 23 nt, Artificial Sequence
  source: /note="Description of Artificial Sequence: Synthetic oligonucleotide"
uuagccacauaugcagcaagucc

SEQ ID NO: 2910 - RNA, 21 nt, Artificial Sequence
  source: /note="Description of Artificial Sequence: Synthetic oligonucleotide"
aguggacuugcugcauaugug

SEQ ID NO: 2911 - RNA, 23 nt, Artificial Sequence
  source: /note="Description of Artificial Sequence: Synthetic oligonucleotide"
cacauaugcagcaaguccacugu

SEQ ID NO: 2912 - RNA, 21 nt, Artificial Sequence
  source: /note="Description of Artificial Sequence: Synthetic oligonucleotide"
caguggacuugcugcauaugu

SEQ ID NO: 2913 - RNA, 23 nt, Artificial Sequence
  source: /note="Description of Artificial Sequence: Synthetic oligonucleotide"
acauaugcagcaaguccacuguc

SEQ ID NO: 2914 - RNA, 21 nt, Artificial Sequence
  source: /note="Description of Artificial Sequence: Synthetic oligonucleotide"
uaaaucaguacuuccaaaguc

SEQ ID NO: 2915 - RNA, 23 nt, Artificial Sequence
  source: /note="Description of Artificial Sequence: Synthetic oligonucleotide"
gacuuuggaaguacugauuuagc

SEQ ID NO: 2916 - RNA, 21 nt, Artificial Sequence
  source: /note="Description of Artificial Sequence: Synthetic oligonucleotide"
aaaucaguacuuccaaagucu

SEQ ID NO: 2917 - RNA, 23 nt, Artificial Sequence
  source: /note="Description of Artificial Sequence: Synthetic oligonucleotide"
agacuuuggaaguacugauuuag

SEQ ID NO: 2918 - RNA, 21 nt, Artificial Sequence
  source: /note="Description of Artificial Sequence: Synthetic oligonucleotide"
augcuaaaucaguacuuccaa

SEQ ID NO: 2919 - RNA, 23 nt, Artificial Sequence
  source: /note="Description of Artificial Sequence: Synthetic oligonucleotide"
uuggaaguacugauuuagcaugu

SEQ ID NO: 2920 - RNA, 21 nt, Artificial Sequence
  source: /note="Description of Artificial Sequence: Synthetic oligonucleotide"
caugcuaaaucaguacuucca

SEQ ID NO: 2921 - RNA, 23 nt, Artificial Sequence
  source: /note="Description of Artificial Sequence: Synthetic oligonucleotide"
uggaaguacugauuuagcauguu

SEQ ID NO: 2922 - RNA, 21 nt, Artificial Sequence
  source: /note="Description of Artificial Sequence: Synthetic oligonucleotide"
uccucaauugaagaaguggcg

SEQ ID NO: 2923 - RNA, 23 nt, Artificial Sequence
  source: /note="Description of Artificial Sequence: Synthetic oligonucleotide"
cgccacuucuucaauugaggagg

SEQ ID NO: 2924 - RNA, 21 nt, Artificial Sequence
  source: /note="Description of Artificial Sequence: Synthetic oligonucleotide"
ccucaauugaagaaguggcgg

SEQ ID NO: 2925 - RNA, 23 nt, Artificial Sequence
  source: /note="Description of Artificial Sequence: Synthetic oligonucleotide"
ccgccacuucuucaauugaggag

SEQ ID NO: 2926 - RNA, 21 nt, Artificial Sequence
  source: /note="Description of Artificial Sequence: Synthetic oligonucleotide"
caccuccucaauugaagaagu

SEQ ID NO: 2927 - RNA, 23 nt, Artificial Sequence
  source: /note="Description of Artificial Sequence: Synthetic oligonucleotide"
acuucuucaauugaggagguggc

SEQ ID NO: 2928 - RNA, 21 nt, Artificial Sequence
  source: /note="Description of Artificial Sequence: Synthetic oligonucleotide"
ccaccuccucaauugaagaag

SEQ ID NO: 2929 - RNA, 23 nt, Artificial Sequence
  source: /note="Description of Artificial Sequence: Synthetic oligonucleotide"
cuucuucaauugaggagguggcc

SEQ ID NO: 2930 - RNA, 21 nt, Artificial Sequence
  source: /note="Description of Artificial Sequence: Synthetic oligonucleotide"
caagauguccucgagauacua

SEQ ID NO: 2931 - RNA, 23 nt, Artificial Sequence
  source: /note="Description of Artificial Sequence: Synthetic oligonucleotide"
uaguaucucgaggacaucuugaa

SEQ ID NO: 2932 - RNA, 21 nt, Artificial Sequence
  source: /note="Description of Artificial Sequence: Synthetic oligonucleotide"
aagauguccucgagauacuaa

SEQ ID NO: 2933 - RNA, 23 nt, Artificial Sequence
  source: /note="Description of Artificial Sequence: Synthetic oligonucleotide"
uuaguaucucgaggacaucuuga

SEQ ID NO: 2934 - RNA, 21 nt, Artificial Sequence
  source: /note="Description of Artificial Sequence: Synthetic oligonucleotide"
uguucaagauguccucgagau

SEQ ID NO: 2935 - RNA, 23 nt, Artificial Sequence
  source: /note="Description of Artificial Sequence: Synthetic oligonucleotide"
aucucgaggacaucuugaacacc

SEQ ID NO: 2936 - RNA, 21 nt, Artificial Sequence
  source: /note="Description of Artificial Sequence: Synthetic oligonucleotide"
guguucaagauguccucgaga

SEQ ID NO: 2937 - RNA, 23 nt, Artificial Sequence
  source: /note="Description of Artificial Sequence: Synthetic oligonucleotide"
ucucgaggacaucuugaacaccu

SEQ ID NO: 2938 - RNA, 21 nt, Artificial Sequence
  source: /note="Description of Artificial Sequence: Synthetic oligonucleotide"
acaugcuaaaucaguacuucc

SEQ ID NO: 2939 - RNA, 23 nt, Artificial Sequence
  source: /note="Description of Artificial Sequence: Synthetic oligonucleotide"
ggaaguacugauuuagcauguug

SEQ ID NO: 2940 - RNA, 21 nt, Artificial Sequence
  source: /note="Description of Artificial Sequence: Synthetic oligonucleotide"
caugcuaaaucaguacuucca

SEQ ID NO: 2941 - RNA, 23 nt, Artificial Sequence
  source: /note="Description of Artificial Sequence: Synthetic oligonucleotide"
uggaaguacugauuuagcauguu

SEQ ID NO: 2942 - RNA, 21 nt, Artificial Sequence
  source: /note="Description of Artificial Sequence: Synthetic oligonucleotide"
aacaacaugcuaaaucaguac

SEQ ID NO: 2943 - RNA, 23 nt, Artificial Sequence
  source: /note="Description of Artificial Sequence: Synthetic oligonucleotide"
guacugauuuagcauguuguuca

SEQ ID NO: 2944 - RNA, 21 nt, Artificial Sequence
  source: /note="Description of Artificial Sequence: Synthetic oligonucleotide"
gaacaacaugcuaaaucagua

SEQ ID NO: 2945 - RNA, 23 nt, Artificial Sequence
  source: /note="Description of Artificial Sequence: Synthetic oligonucleotide"
uacugauuuagcauguuguucau

SEQ ID NO: 2946 - RNA, 21 nt, Artificial Sequence
  source: /note="Description of Artificial Sequence: Synthetic oligonucleotide"
gaaaggcacugauguucugaa

SEQ ID NO: 2947 - RNA, 23 nt, Artificial Sequence
  source: /note="Description of Artificial Sequence: Synthetic oligonucleotide"
uucagaacaucagugccuuuccg

SEQ ID NO: 2948 - RNA, 21 nt, Artificial Sequence
  source: /note="Description of Artificial Sequence: Synthetic oligonucleotide"
aaaggcacugauguucugaaa

SEQ ID NO: 2949 - RNA, 23 nt, Artificial Sequence
  source: /note="Description of Artificial Sequence: Synthetic oligonucleotide"
uuucagaacaucagugccuuucc

SEQ ID NO: 2950 - RNA, 21 nt, Artificial Sequence
  source: /note="Description of Artificial Sequence: Synthetic oligonucleotide"
ugcggaaaggcacugauguuc

SEQ ID NO: 2951 - RNA, 23 nt, Artificial Sequence
  source: /note="Description of Artificial Sequence: Synthetic oligonucleotide"
gaacaucagugccuuuccgcaca

SEQ ID NO: 2952 - RNA, 21 nt, Artificial Sequence
  source: /note="Description of Artificial Sequence: Synthetic oligonucleotide"
gugcggaaaggcacugauguu

SEQ ID NO: 2953 - RNA, 23 nt, Artificial Sequence
  source: /note="Description of Artificial Sequence: Synthetic oligonucleotide"
aacaucagugccuuuccgcacac

SEQ ID NO: 2954 - RNA, 21 nt, Artificial Sequence
  source: /note="Description of Artificial Sequence: Synthetic oligonucleotide"
gucagcaugccaauaugugug

SEQ ID NO: 2955 - RNA, 23 nt, Artificial Sequence
  source: /note="Description of Artificial Sequence: Synthetic oligonucleotide"
cacacauauuggcaugcugaccc

SEQ ID NO: 2956 - RNA, 21 nt, Artificial Sequence
  source: /note="Description of Artificial Sequence: Synthetic oligonucleotide"
ucagcaugccaauaugugugg

SEQ ID NO: 2957 - RNA, 23 nt, Artificial Sequence
  source: /note="Description of Artificial Sequence: Synthetic oligonucleotide"
ccacacauauuggcaugcugacc

SEQ ID NO: 2958 - RNA, 21 nt, Artificial Sequence
  source: /note="Description of Artificial Sequence: Synthetic oligonucleotide"
gagggucagcaugccaauaug

SEQ ID NO: 2959 - RNA, 23 nt, Artificial Sequence
  source: /note="Description of Artificial Sequence: Synthetic oligonucleotide"
cauauuggcaugcugacccucug

SEQ ID NO: 2960 - RNA, 21 nt, Artificial Sequence
  source: /note="Description of Artificial Sequence: Synthetic oligonucleotide"
agagggucagcaugccaauau

SEQ ID NO: 2961 - RNA, 23 nt, Artificial Sequence
  source: /note="Description of Artificial Sequence: Synthetic oligonucleotide"
auauuggcaugcugacccucugu

SEQ ID NO: 2962 - RNA, 21 nt, Artificial Sequence
  source: /note="Description of Artificial Sequence: Synthetic oligonucleotide"
gaugcuccggaauguugcuga

SEQ ID NO: 2963 - RNA, 23 nt, Artificial Sequence
  source: /note="Description of Artificial Sequence: Synthetic oligonucleotide"
ucagcaacauuccggagcauccu

SEQ ID NO: 2964 - RNA, 21 nt, Artificial Sequence
  source: /note="Description of Artificial Sequence: Synthetic oligonucleotide"
augcuccggaauguugcugaa

SEQ ID NO: 2965 - RNA, 23 nt, Artificial Sequence
  source: /note="Description of Artificial Sequence: Synthetic oligonucleotide"
uucagcaacauuccggagcaucc

SEQ ID NO: 2966 - RNA, 21 nt, Artificial Sequence
  source: /note="Description of Artificial Sequence: Synthetic oligonucleotide"
caaggaugcuccggaauguug

SEQ ID NO: 2967 - RNA, 23 nt, Artificial Sequence
  source: /note="Description of Artificial Sequence: Synthetic oligonucleotide"
caacauuccggagcauccuugga

SEQ ID NO: 2968 - RNA, 21 nt, Artificial Sequence
  source: /note="Description of Artificial Sequence: Synthetic oligonucleotide"
ccaaggaugcuccggaauguu

SEQ ID NO: 2969 - RNA, 23 nt, Artificial Sequence
  source: /note="Description of Artificial Sequence: Synthetic oligonucleotide"
aacauuccggagcauccuuggau

SEQ ID NO: 2970 - RNA, 21 nt, Artificial Sequence
  source: /note="Description of Artificial Sequence: Synthetic oligonucleotide"
gcguaacagauucaaacugcc

SEQ ID NO: 2971 - RNA, 23 nt, Artificial Sequence
  source: /note="Description of Artificial Sequence: Synthetic oligonucleotide"
ggcaguuugaaucuguuacgcac

SEQ ID NO: 2972 - RNA, 21 nt, Artificial Sequence
  source: /note="Description of Artificial Sequence: Synthetic oligonucleotide"
cguaacagauucaaacugccg

SEQ ID NO: 2973 - RNA, 23 nt, Artificial Sequence
  source: /note="Description of Artificial Sequence: Synthetic oligonucleotide"
cggcaguuugaaucuguuacgca

SEQ ID NO: 2974 - RNA, 21 nt, Artificial Sequence
  source: /note="Description of Artificial Sequence: Synthetic oligonucleotide"
augugcguaacagauucaaac

SEQ ID NO: 2975 - RNA, 23 nt, Artificial Sequence
  source: /note="Description of Artificial Sequence: Synthetic oligonucleotide"
guuugaaucuguuacgcacauca

SEQ ID NO: 2976 - RNA, 21 nt, Artificial Sequence
  source: /note="Description of Artificial Sequence: Synthetic oligonucleotide"
gaugugcguaacagauucaaa

SEQ ID NO: 2977 - RNA, 23 nt, Artificial Sequence
  source: /note="Description of Artificial Sequence: Synthetic oligonucleotide"
uuugaaucuguuacgcacaucau

SEQ ID NO: 2978 - RNA, 21 nt, Artificial Sequence
  source: /note="Description of Artificial Sequence: Synthetic oligonucleotide"
agagaagaugggcuacaaggc

SEQ ID NO: 2979 - RNA, 23 nt, Artificial Sequence
  source: /note="Description of Artificial Sequence: Synthetic oligonucleotide"
gccuuguagcccaucuucucugc

SEQ ID NO: 2980 - RNA, 21 nt, Artificial Sequence
  source: /note="Description of Artificial Sequence: Synthetic oligonucleotide"
gagaagaugggcuacaaggcc

SEQ ID NO: 2981 - RNA, 23 nt, Artificial Sequence
  source: /note="Description of Artificial Sequence: Synthetic oligonucleotide"
ggccuuguagcccaucuucucug

SEQ ID NO: 2982 - RNA, 21 nt, Artificial Sequence
  source: /note="Description of Artificial Sequence: Synthetic oligonucleotide"
aggcagagaagaugggcuaca

SEQ ID NO: 2983 - RNA, 23 nt, Artificial Sequence
  source: /note="Description of Artificial Sequence: Synthetic oligonucleotide"
uguagcccaucuucucugccugc

SEQ ID NO: 2984 - RNA, 21 nt, Artificial Sequence
  source: /note="Description of Artificial Sequence: Synthetic oligonucleotide"
caggcagagaagaugggcuac

SEQ ID NO: 2985 - RNA, 23 nt, Artificial Sequence
  source: /note="Description of Artificial Sequence: Synthetic oligonucleotide"
guagcccaucuucucugccugcc

SEQ ID NO: 2986 - protein, 16 aa, Unknown
  source: /note="Description of Unknown: RFGF peptide"
AAVALLPAVLLALLAP

SEQ ID NO: 2987 - protein, 11 aa, Unknown
  source: /note="Description of Unknown: RFGF analogue peptide"
AALLPVLLAAP

SEQ ID NO: 2988 - protein, 13 aa, Human immunodeficiency virus
GRKKRRQRRRPPQ

SEQ ID NO: 2989 - protein, 16 aa, Drosophila sp.
RQIKIWFQNRRMKWKK

SEQ ID NO: 2990 - RNA, 21 nt, Artificial Sequence
  source: /note="Description of Artificial Sequence: Synthetic oligonucleotide"
aacaccaaaaauugucuccaa

SEQ ID NO: 2991 - RNA, 21 nt, Artificial Sequence
  source: /note="Description of Artificial Sequence: Synthetic oligonucleotide"
aaaccgaguaauuggaaguga

SEQ ID NO: 2992 - RNA, 21 nt, Artificial Sequence
  source: /note="Description of Artificial Sequence: Synthetic oligonucleotide"
aaaucaguggcuuucccaaaa

SEQ ID NO: 2993 - RNA, 21 nt, Artificial Sequence
  source: /note="Description of Artificial Sequence: Synthetic oligonucleotide"
ucccaacauugucaaguacaa

SEQ ID NO: 2994 - RNA, 21 nt, Artificial Sequence
  source: /note="Description of Artificial Sequence: Synthetic oligonucleotide"
ugugccaucaguaucuuaaua

SEQ ID NO: 2995 - RNA, 21 nt, Artificial Sequence
  source: /note="Description of Artificial Sequence: Synthetic oligonucleotide"
aaauugucuccagcaaagacu

SEQ ID NO: 2996 - RNA, 21 nt, Artificial Sequence
  source: /note="Description of Artificial Sequence: Synthetic oligonucleotide"
accuugaacagugaaaaaaaa

SEQ ID NO: 2997 - RNA, 21 nt, Artificial Sequence
  source: /note="Description of Artificial Sequence: Synthetic oligonucleotide"
aaaacaccaaaaauugucuca

SEQ ID NO: 2998 - RNA, 21 nt, Artificial Sequence
  source: /note="Description of Artificial Sequence: Synthetic oligonucleotide"
accaaaaauugucuccagcaa

SEQ ID NO: 2999 - RNA, 21 nt, Artificial Sequence
  source: /note="Description of Artificial Sequence: Synthetic oligonucleotide"
caaguucaucauucccaacau

SEQ ID NO: 3000 - RNA, 21 nt, Artificial Sequence
  source: /note="Description of Artificial Sequence: Synthetic oligonucleotide"
gcaauauuaugugagauguaa

SEQ ID NO: 3001 - RNA, 21 nt, Artificial Sequence
  source: /note="Description of Artificial Sequence: Synthetic oligonucleotide"
gucucaaaagauucaaaguca

SEQ ID NO: 3002 - RNA, 21 nt, Artificial Sequence
  source: /note="Description of Artificial Sequence: Synthetic oligonucleotide"
cauucccaacauugucaagua

SEQ ID NO: 3003 - RNA, 21 nt, Artificial Sequence
  source: /note="Description of Artificial Sequence: Synthetic oligonucleotide"
aaaccuugaacagugaaaaaa

SEQ ID NO: 3004 - RNA, 21 nt, Artificial Sequence
  source: /note="Description of Artificial Sequence: Synthetic oligonucleotide"
ucaaaagauucaaaguccaaa

SEQ ID NO: 3005 - RNA, 21 nt, Artificial Sequence
  source: /note="Description of Artificial Sequence: Synthetic oligonucleotide"
acaucuucaaguucaucauua

SEQ ID NO: 3006 - RNA, 21 nt, Artificial Sequence
  source: /note="Description of Artificial Sequence: Synthetic oligonucleotide"
cagcugauugugaaucuucuu

SEQ ID NO: 3007 - RNA, 21 nt, Artificial Sequence
  source: /note="Description of Artificial Sequence: Synthetic oligonucleotide"
cucaaaagauucaaaguccaa

SEQ ID NO: 3008 - RNA, 21 nt, Artificial Sequence
  source: /note="Description of Artificial Sequence: Synthetic oligonucleotide"
aaaaccgaguaauuggaagua

SEQ ID NO: 3009 - RNA, 21 nt, Artificial Sequence
  source: /note="Description of Artificial Sequence: Synthetic oligonucleotide"
ugaugcauaucuugugcauaa

SEQ ID NO: 3010 - RNA, 21 nt, Artificial Sequence
  source: /note="Description of Artificial Sequence: Synthetic oligonucleotide"
ccaucaguaucuuaaugaaga

SEQ ID NO: 3011 - RNA, 21 nt, Artificial Sequence
  source: /note="Description of Artificial Sequence: Synthetic oligonucleotide"
aaucaguggcuuucccaaaaa

SEQ ID NO: 3012 - RNA, 21 nt, Artificial Sequence
  source: /note="Description of Artificial Sequence: Synthetic oligonucleotide"
uuaaaacaccaaaaauugucu

SEQ ID NO: 3013 - RNA, 21 nt, Artificial Sequence
  source: /note="Description of Artificial Sequence: Synthetic oligonucleotide"
cugauugugaaucuucuuaaa

SEQ ID NO: 3014 - RNA, 21 nt, Artificial Sequence
  source: /note="Description of Artificial Sequence: Synthetic oligonucleotide"
auaaaaccuugaacagugaaa

SEQ ID NO: 3015 - RNA, 21 nt, Artificial Sequence
  source: /note="Description of Artificial Sequence: Synthetic oligonucleotide"
agugucaugccaaauaaaaca

SEQ ID NO: 3016 - RNA, 21 nt, Artificial Sequence
  source: /note="Description of Artificial Sequence: Synthetic oligonucleotide"
acaccaaaaauugucuccaga

SEQ ID NO: 3017 - RNA, 21 nt, Artificial Sequence
  source: /note="Description of Artificial Sequence: Synthetic oligonucleotide"
gcauugcaauauuaugugaga

SEQ ID NO: 3018 - RNA, 21 nt, Artificial Sequence
  source: /note="Description of Artificial Sequence: Synthetic oligonucleotide"
gucaugccaaauaaaaccuua

SEQ ID NO: 3019 - RNA, 21 nt, Artificial Sequence
  source: /note="Description of Artificial Sequence: Synthetic oligonucleotide"
auaucuugugcauaaauguua

SEQ ID NO: 3020 - RNA, 21 nt, Artificial Sequence
  source: /note="Description of Artificial Sequence: Synthetic oligonucleotide"
aaacaccaaaaauugucucca

SEQ ID NO: 3021 - RNA, 21 nt, Artificial Sequence
  source: /note="Description of Artificial Sequence: Synthetic oligonucleotide"
uaaccuggcuccaguguguaa

SEQ ID NO: 3022 - RNA, 21 nt, Artificial Sequence
  source: /note="Description of Artificial Sequence: Synthetic oligonucleotide"
ugcauaucuugugcauaaaua

SEQ ID NO: 3023 - RNA, 21 nt, Artificial Sequence
  source: /note="Description of Artificial Sequence: Synthetic oligonucleotide"
acauugucaaguacaguccaa

SEQ ID NO: 3024 - RNA, 21 nt, Artificial Sequence
  source: /note="Description of Artificial Sequence: Synthetic oligonucleotide"
aaccuugaacagugaaaaaaa

SEQ ID NO: 3025 - RNA, 21 nt, Artificial Sequence
  source: /note="Description of Artificial Sequence: Synthetic oligonucleotide"
gugugcauugcaauauuaugu

SEQ ID NO: 3026 - RNA, 21 nt, Artificial Sequence
  source: /note="Description of Artificial Sequence: Synthetic oligonucleotide"
ccaaaaaccgaguaauuggaa

SEQ ID NO: 3027 - RNA, 21 nt, Artificial Sequence
  source: /note="Description of Artificial Sequence: Synthetic oligonucleotide"
caaaaaccgaguaauuggaaa

SEQ ID NO: 3028 - RNA, 21 nt, Artificial Sequence
  source: /note="Description of Artificial Sequence: Synthetic oligonucleotide"
ccaagugguacuuguguagua

SEQ ID NO: 3029 - RNA, 21 nt, Artificial Sequence
  source: /note="Description of Artificial Sequence: Synthetic oligonucleotide"
cagcgaaacgugaacaucuua

SEQ ID NO: 3030 - RNA, 21 nt, Artificial Sequence
  source: /note="Description of Artificial Sequence: Synthetic oligonucleotide"
ugauugugaaucuucuuaaga

SEQ ID NO: 3031 - RNA, 21 nt, Artificial Sequence
  source: /note="Description of Artificial Sequence: Synthetic oligonucleotide"
cuucaaguucaucauucccaa

SEQ ID NO: 3032 - RNA, 21 nt, Artificial Sequence
  source: /note="Description of Artificial Sequence: Synthetic oligonucleotide"
ggaccagcugauugugaaucu

SEQ ID NO: 3033 - RNA, 21 nt, Artificial Sequence
  source: /note="Description of Artificial Sequence: Synthetic oligonucleotide"
augccaaauaaaaccuugaaa

SEQ ID NO: 3034 - RNA, 23 nt, Artificial Sequence
  source: /note="Description of Artificial Sequence: Synthetic oligonucleotide"
uuggagacaauuuuugguguuuu

SEQ ID NO: 3035 - RNA, 23 nt, Artificial Sequence
  source: /note="Description of Artificial Sequence: Synthetic oligonucleotide"
ucacuuccaauuacucgguuuuu

SEQ ID NO: 3036 - RNA, 23 nt, Artificial Sequence
  source: /note="Description of Artificial Sequence: Synthetic oligonucleotide"
uuuugggaaagccacugauuuuc

SEQ ID NO: 3037 - RNA, 23 nt, Artificial Sequence
  source: /note="Description of Artificial Sequence: Synthetic oligonucleotide"
uuguacuugacaauguugggaau

SEQ ID NO: 3038 - RNA, 23 nt, Artificial Sequence
  source: /note="Description of Artificial Sequence: Synthetic oligonucleotide"
uauuaagauacugauggcacaag

SEQ ID NO: 3039 - RNA, 23 nt, Artificial Sequence
  source: /note="Description of Artificial Sequence: Synthetic oligonucleotide"
agucuuugcuggagacaauuuuu

SEQ ID NO: 3040 - RNA, 23 nt, Artificial Sequence
  source: /note="Description of Artificial Sequence: Synthetic oligonucleotide"
uuuuuuuucacuguucaagguuu

SEQ ID NO: 3041 - RNA, 23 nt, Artificial Sequence
  source: /note="Description of Artificial Sequence: Synthetic oligonucleotide"
ugagacaauuuuugguguuuuaa

SEQ ID NO: 3042 - RNA, 23 nt, Artificial Sequence
  source: /note="Description of Artificial Sequence: Synthetic oligonucleotide"
uugcuggagacaauuuuuggugu

SEQ ID NO: 3043 - RNA, 23 nt, Artificial Sequence
  source: /note="Description of Artificial Sequence: Synthetic oligonucleotide"
auguugggaaugaugaacuugaa

SEQ ID NO: 3044 - RNA, 23 nt, Artificial Sequence
  source: /note="Description of Artificial Sequence: Synthetic oligonucleotide"
uuacaucucacauaauauugcaa

SEQ ID NO: 3045 - RNA, 23 nt, Artificial Sequence
  source: /note="Description of Artificial Sequence: Synthetic oligonucleotide"
ugacuuugaaucuuuugagaccg

SEQ ID NO: 3046 - RNA, 23 nt, Artificial Sequence
  source: /note="Description of Artificial Sequence: Synthetic oligonucleotide"
uacuugacaauguugggaaugau

SEQ ID NO: 3047 - RNA, 23 nt, Artificial Sequence
  source: /note="Description of Artificial Sequence: Synthetic oligonucleotide"
uuuuuucacuguucaagguuuua

SEQ ID NO: 3048 - RNA, 23 nt, Artificial Sequence
  source: /note="Description of Artificial Sequence: Synthetic oligonucleotide"
uuuggacuuugaaucuuuugaga

SEQ ID NO: 3049 - RNA, 23 nt, Artificial Sequence
  source: /note="Description of Artificial Sequence: Synthetic oligonucleotide"
uaaugaugaacuugaagauguuc

SEQ ID NO: 3050 - RNA, 23 nt, Artificial Sequence
  source: /note="Description of Artificial Sequence: Synthetic oligonucleotide"
aagaagauucacaaucagcuggu

SEQ ID NO: 3051 - RNA, 23 nt, Artificial Sequence
  source: /note="Description of Artificial Sequence: Synthetic oligonucleotide"
uuggacuuugaaucuuuugagac

SEQ ID NO: 3052 - RNA, 23 nt, Artificial Sequence
  source: /note="Description of Artificial Sequence: Synthetic oligonucleotide"
uacuuccaauuacucgguuuuug

SEQ ID NO: 3053 - RNA, 23 nt, Artificial Sequence
  source: /note="Description of Artificial Sequence: Synthetic oligonucleotide"
uuaugcacaagauaugcaucaug

SEQ ID NO: 3054 - RNA, 23 nt, Artificial Sequence
  source: /note="Description of Artificial Sequence: Synthetic oligonucleotide"
ucuucauuaagauacugauggca

SEQ ID NO: 3055 - RNA, 23 nt, Artificial Sequence
  source: /note="Description of Artificial Sequence: Synthetic oligonucleotide"
uuuuugggaaagccacugauuuu

SEQ ID NO: 3056 - RNA, 23 nt, Artificial Sequence
  source: /note="Description of Artificial Sequence: Synthetic oligonucleotide"
agacaauuuuugguguuuuaagg

SEQ ID NO: 3057 - RNA, 23 nt, Artificial Sequence
  source: /note="Description of Artificial Sequence: Synthetic oligonucleotide"
uuuaagaagauucacaaucagcu

SEQ ID NO: 3058 - RNA, 23 nt, Artificial Sequence
  source: /note="Description of Artificial Sequence: Synthetic oligonucleotide"
uuucacuguucaagguuuuauuu

SEQ ID NO: 3059 - RNA, 23 nt, Artificial Sequence
  source: /note="Description of Artificial Sequence: Synthetic oligonucleotide"
uguuuuauuuggcaugacacuug

SEQ ID NO: 3060 - RNA, 23 nt, Artificial Sequence
  source: /note="Description of Artificial Sequence: Synthetic oligonucleotide"
ucuggagacaauuuuugguguuu

SEQ ID NO: 3061 - RNA, 23 nt, Artificial Sequence
  source: /note="Description of Artificial Sequence: Synthetic oligonucleotide"
ucucacauaauauugcaaugcac

SEQ ID NO: 3062 - RNA, 23 nt, Artificial Sequence
  source: /note="Description of Artificial Sequence: Synthetic oligonucleotide"
uaagguuuuauuuggcaugacac

SEQ ID NO: 3063 - RNA, 23 nt, Artificial Sequence
  source: /note="Description of Artificial Sequence: Synthetic oligonucleotide"
uaacauuuaugcacaagauaugc

SEQ ID NO: 3064 - RNA, 23 nt, Artificial Sequence
  source: /note="Description of Artificial Sequence: Synthetic oligonucleotide"
uggagacaauuuuugguguuuua

SEQ ID NO: 3065 - RNA, 23 nt, Artificial Sequence
  source: /note="Description of Artificial Sequence: Synthetic oligonucleotide"
uuacacacuggagccagguuaua

SEQ ID NO: 3066 - RNA, 23 nt, Artificial Sequence
  source: /note="Description of Artificial Sequence: Synthetic oligonucleotide"
uauuuaugcacaagauaugcauc

SEQ ID NO: 3067 - RNA, 23 nt, Artificial Sequence
  source: /note="Description of Artificial Sequence: Synthetic oligonucleotide"
uuggacuguacuugacaauguug

SEQ ID NO: 3068 - RNA, 23 nt, Artificial Sequence
  source: /note="Description of Artificial Sequence: Synthetic oligonucleotide"
uuuuuuucacuguucaagguuuu

SEQ ID NO: 3069 - RNA, 23 nt, Artificial Sequence
  source: /note="Description of Artificial Sequence: Synthetic oligonucleotide"
acauaauauugcaaugcacacua

SEQ ID NO: 3070 - RNA, 23 nt, Artificial Sequence
  source: /note="Description of Artificial Sequence: Synthetic oligonucleotide"
uuccaauuacucgguuuuuggga

SEQ ID NO: 3071 - RNA, 23 nt, Artificial Sequence
  source: /note="Description of Artificial Sequence: Synthetic oligonucleotide"
uuuccaauuacucgguuuuuggg

SEQ ID NO: 3072 - RNA, 23 nt, Artificial Sequence
  source: /note="Description of Artificial Sequence: Synthetic oligonucleotide"
uacuacacaaguaccacuuggca

SEQ ID NO: 3073 - RNA, 23 nt, Artificial Sequence
  source: /note="Description of Artificial Sequence: Synthetic oligonucleotide"
uaagauguucacguuucgcugga

SEQ ID NO: 3074 - RNA, 23 nt, Artificial Sequence
  source: /note="Description of Artificial Sequence: Synthetic oligonucleotide"
ucuuaagaagauucacaaucagc

SEQ ID NO: 3075 - RNA, 23 nt, Artificial Sequence
  source: /note="Description of Artificial Sequence: Synthetic oligonucleotide"
uugggaaugaugaacuugaagau

SEQ ID NO: 3076 - RNA, 23 nt, Artificial Sequence
  source: /note="Description of Artificial Sequence: Synthetic oligonucleotide"
agauucacaaucagcugguccuu

SEQ ID NO: 3077 - RNA, 23 nt, Artificial Sequence
  source: /note="Description of Artificial Sequence: Synthetic oligonucleotide"
uuucaagguuuuauuuggcauga

SEQ ID NO: 3078 - RNA, 21 nt, Artificial Sequence
  source: /note="Description of Artificial Sequence: Synthetic oligonucleotide"
aacaccaaaaauugucuccaa

SEQ ID NO: 3079 - RNA, 21 nt, Artificial Sequence
  source: /note="Description of Artificial Sequence: Synthetic oligonucleotide"
aaaccgaguaauuggaaguga

SEQ ID NO: 3080 - RNA, 21 nt, Artificial Sequence
  source: /note="Description of Artificial Sequence: Synthetic oligonucleotide"
aaaucaguggcuuucccaaaa

SEQ ID NO: 3081 - RNA, 21 nt, Artificial Sequence
  source: /note="Description of Artificial Sequence: Synthetic oligonucleotide"
ucccaacauugucaaguacaa

SEQ ID NO: 3082 - RNA, 21 nt, Artificial Sequence
  source: /note="Description of Artificial Sequence: Synthetic oligonucleotide"
ugugccaucaguaucuuaaua

SEQ ID NO: 3083 - RNA, 21 nt, Artificial Sequence
  source: /note="Description of Artificial Sequence: Synthetic oligonucleotide"
aaauugucuccagcaaagacu

SEQ ID NO: 3084 - RNA, 21 nt, Artificial Sequence
  source: /note="Description of Artificial Sequence: Synthetic oligonucleotide"
accuugaacagugaaaaaaaa

SEQ ID NO: 3085 - RNA, 21 nt, Artificial Sequence
  source: /note="Description of Artificial Sequence: Synthetic oligonucleotide"
aaaacaccaaaaauugucuca

SEQ ID NO: 3086 - RNA, 21 nt, Artificial Sequence
  source: /note="Description of Artificial Sequence: Synthetic oligonucleotide"
accaaaaauugucuccagcaa

SEQ ID NO: 3087 - RNA, 21 nt, Artificial Sequence
  source: /note="Description of Artificial Sequence: Synthetic oligonucleotide"
caaguucaucauucccaacau

SEQ ID NO: 3088 - RNA, 21 nt, Artificial Sequence
  source: /note="Description of Artificial Sequence: Synthetic oligonucleotide"
gcaauauuaugugagauguaa

SEQ ID NO: 3089 - RNA, 21 nt, Artificial Sequence
  source: /note="Description of Artificial Sequence: Synthetic oligonucleotide"
gucucaaaagauucaaaguca

SEQ ID NO: 3090 - RNA, 21 nt, Artificial Sequence
  source: /note="Description of Artificial Sequence: Synthetic oligonucleotide"
cauucccaacauugucaagua

SEQ ID NO: 3091 - RNA, 21 nt, Artificial Sequence
  source: /note="Description of Artificial Sequence: Synthetic oligonucleotide"
aaaccuugaacagugaaaaaa

SEQ ID NO: 3092 - RNA, 21 nt, Artificial Sequence
  source: /note="Description of Artificial Sequence: Synthetic oligonucleotide"
ucaaaagauucaaaguccaaa

SEQ ID NO: 3093 - RNA, 21 nt, Artificial Sequence
  source: /note="Description of Artificial Sequence: Synthetic oligonucleotide"
acaucuucaaguucaucauua

SEQ ID NO: 3094 - RNA, 21 nt, Artificial Sequence
  source: /note="Description of Artificial Sequence: Synthetic oligonucleotide"
cagcugauugugaaucuucuu

SEQ ID NO: 3095 - RNA, 21 nt, Artificial Sequence
  source: /note="Description of Artificial Sequence: Synthetic oligonucleotide"
cucaaaagauucaaaguccaa

SEQ ID NO: 3096 - RNA, 21 nt, Artificial Sequence
  source: /note="Description of Artificial Sequence: Synthetic oligonucleotide"
aaaaccgaguaauuggaagua

SEQ ID NO: 3097 - RNA, 21 nt, Artificial Sequence
  source: /note="Description of Artificial Sequence: Synthetic oligonucleotide"
ugaugcauaucuugugcauaa

SEQ ID NO: 3098 - RNA, 21 nt, Artificial Sequence
  source: /note="Description of Artificial Sequence: Synthetic oligonucleotide"
ccaucaguaucuuaaugaaga

SEQ ID NO: 3099 - RNA, 21 nt, Artificial Sequence
  source: /note="Description of Artificial Sequence: Synthetic oligonucleotide"
aaucaguggcuuucccaaaaa

SEQ ID NO: 3100 - RNA, 21 nt, Artificial Sequence
  source: /note="Description of Artificial Sequence: Synthetic oligonucleotide"
uuaaaacaccaaaaauugucu

SEQ ID NO: 3101 - RNA, 21 nt, Artificial Sequence
  source: /note="Description of Artificial Sequence: Synthetic oligonucleotide"
cugauugugaaucuucuuaaa

SEQ ID NO: 3102 - RNA, 21 nt, Artificial Sequence
  source: /note="Description of Artificial Sequence: Synthetic oligonucleotide"
auaaaaccuugaacagugaaa

SEQ ID NO: 3103 - RNA, 21 nt, Artificial Sequence
  source: /note="Description of Artificial Sequence: Synthetic oligonucleotide"
agugucaugccaaauaaaaca

SEQ ID NO: 3104 - RNA, 21 nt, Artificial Sequence
  source: /note="Description of Artificial Sequence: Synthetic oligonucleotide"
acaccaaaaauugucuccaga

SEQ ID NO: 3105 - RNA, 21 nt, Artificial Sequence
  source: /note="Description of Artificial Sequence: Synthetic oligonucleotide"
gcauugcaauauuaugugaga

SEQ ID NO: 3106 - RNA, 21 nt, Artificial Sequence
  source: /note="Description of Artificial Sequence: Synthetic oligonucleotide"
gucaugccaaauaaaaccuua

SEQ ID NO: 3107 - RNA, 21 nt, Artificial Sequence
  source: /note="Description of Artificial Sequence: Synthetic oligonucleotide"
auaucuugugcauaaauguua

SEQ ID NO: 3108 - RNA, 21 nt, Artificial Sequence
  source: /note="Description of Artificial Sequence: Synthetic oligonucleotide"
aaacaccaaaaauugucucca

SEQ ID NO: 3109 - RNA, 21 nt, Artificial Sequence
  source: /note="Description of Artificial Sequence: Synthetic oligonucleotide"
uaaccuggcuccaguguguaa

SEQ ID NO: 3110 - RNA, 21 nt, Artificial Sequence
  source: /note="Description of Artificial Sequence: Synthetic oligonucleotide"
ugcauaucuugugcauaaaua

SEQ ID NO: 3111 - RNA, 21 nt, Artificial Sequence
  source: /note="Description of Artificial Sequence: Synthetic oligonucleotide"
acauugucaaguacaguccaa

SEQ ID NO: 3112 - RNA, 21 nt, Artificial Sequence
  source: /note="Description of Artificial Sequence: Synthetic oligonucleotide"
aaccuugaacagugaaaaaaa

SEQ ID NO: 3113 - RNA, 21 nt, Artificial Sequence
  source: /note="Description of Artificial Sequence: Synthetic oligonucleotide"
gugugcauugcaauauuaugu

SEQ ID NO: 3114 - RNA, 21 nt, Artificial Sequence
  source: /note="Description of Artificial Sequence: Synthetic oligonucleotide"
ccaaaaaccgaguaauuggaa

SEQ ID NO: 3115 - RNA, 21 nt, Artificial Sequence
  source: /note="Description of Artificial Sequence: Synthetic oligonucleotide"
caaaaaccgaguaauuggaaa

SEQ ID NO: 3116 - RNA, 21 nt, Artificial Sequence
  source: /note="Description of Artificial Sequence: Synthetic oligonucleotide"
ccaagugguacuuguguagua

SEQ ID NO: 3117 - RNA, 21 nt, Artificial Sequence
  source: /note="Description of Artificial Sequence: Synthetic oligonucleotide"
cagcgaaacgugaacaucuua

SEQ ID NO: 3118 - RNA, 21 nt, Artificial Sequence
  source: /note="Description of Artificial Sequence: Synthetic oligonucleotide"
ugauugugaaucuucuuaaga

SEQ ID NO: 3119 - RNA, 21 nt, Artificial Sequence
  source: /note="Description of Artificial Sequence: Synthetic oligonucleotide"
cuucaaguucaucauucccaa

SEQ ID NO: 3120 - RNA, 21 nt, Artificial Sequence
  source: /note="Description of Artificial Sequence: Synthetic oligonucleotide"
ggaccagcugauugugaaucu

SEQ ID NO: 3121 - RNA, 21 nt, Artificial Sequence
  source: /note="Description of Artificial Sequence: Synthetic oligonucleotide"
augccaaauaaaaccuugaaa

SEQ ID NO: 3122 - RNA, 23 nt, Artificial Sequence
  source: /note="Description of Artificial Sequence: Synthetic oligonucleotide"
uuggagacaauuuuugguguuuu

SEQ ID NO: 3123 - RNA, 23 nt, Artificial Sequence
  source: /note="Description of Artificial Sequence: Synthetic oligonucleotide"
ucacuuccaauuacucgguuuuu

SEQ ID NO: 3124 - RNA, 23 nt, Artificial Sequence
  source: /note="Description of Artificial Sequence: Synthetic oligonucleotide"
uuuugggaaagccacugauuuuc

SEQ ID NO: 3125 - RNA, 23 nt, Artificial Sequence
  source: /note="Description of Artificial Sequence: Synthetic oligonucleotide"
uuguacuugacaauguugggaau

SEQ ID NO: 3126 - RNA, 23 nt, Artificial Sequence
  source: /note="Description of Artificial Sequence: Synthetic oligonucleotide"
uauuaagauacugauggcacaag

SEQ ID NO: 3127 - RNA, 23 nt, Artificial Sequence
  source: /note="Description of Artificial Sequence: Synthetic oligonucleotide"
agucuuugcuggagacaauuuuu

SEQ ID NO: 3128 - RNA, 23 nt, Artificial Sequence
  source: /note="Description of Artificial Sequence: Synthetic oligonucleotide"
uuuuuuuucacuguucaagguuu

SEQ ID NO: 3129 - RNA, 23 nt, Artificial Sequence
  source: /note="Description of Artificial Sequence: Synthetic oligonucleotide"
ugagacaauuuuugguguuuuaa

SEQ ID NO: 3130 - RNA, 23 nt, Artificial Sequence
  source: /note="Description of Artificial Sequence: Synthetic oligonucleotide"
uugcuggagacaauuuuuggugu

SEQ ID NO: 3131 - RNA, 23 nt, Artificial Sequence
  source: /note="Description of Artificial Sequence: Synthetic oligonucleotide"
auguugggaaugaugaacuugaa

SEQ ID NO: 3132 - RNA, 23 nt, Artificial Sequence
  source: /note="Description of Artificial Sequence: Synthetic oligonucleotide"
uuacaucucacauaauauugcaa

SEQ ID NO: 3133 - RNA, 23 nt, Artificial Sequence
  source: /note="Description of Artificial Sequence: Synthetic oligonucleotide"
ugacuuugaaucuuuugagaccg

SEQ ID NO: 3134 - RNA, 23 nt, Artificial Sequence
  source: /note="Description of Artificial Sequence: Synthetic oligonucleotide"
uacuugacaauguugggaaugau

SEQ ID NO: 3135 - RNA, 23 nt, Artificial Sequence
  source: /note="Description of Artificial Sequence: Synthetic oligonucleotide"
uuuuuucacuguucaagguuuua

SEQ ID NO: 3136 - RNA, 23 nt, Artificial Sequence
  source: /note="Description of Artificial Sequence: Synthetic oligonucleotide"
uuuggacuuugaaucuuuugaga

SEQ ID NO: 3137 - RNA, 23 nt, Artificial Sequence
  source: /note="Description of Artificial Sequence: Synthetic oligonucleotide"
uaaugaugaacuugaagauguuc

SEQ ID NO: 3138 - RNA, 23 nt, Artificial Sequence
  source: /note="Description of Artificial Sequence: Synthetic oligonucleotide"
aagaagauucacaaucagcuggu

SEQ ID NO: 3139 - RNA, 23 nt, Artificial Sequence
  source: /note="Description of Artificial Sequence: Synthetic oligonucleotide"
uuggacuuugaaucuuuugagac

SEQ ID NO: 3140 - RNA, 23 nt, Artificial Sequence
  source: /note="Description of Artificial Sequence: Synthetic oligonucleotide"
uacuuccaauuacucgguuuuug

SEQ ID NO: 3141 - RNA, 23 nt, Artificial Sequence
  source: /note="Description of Artificial Sequence: Synthetic oligonucleotide"
uuaugcacaagauaugcaucaug

SEQ ID NO: 3142 - RNA, 23 nt, Artificial Sequence
  source: /note="Description of Artificial Sequence: Synthetic oligonucleotide"
ucuucauuaagauacugauggca

SEQ ID NO: 3143 - RNA, 23 nt, Artificial Sequence
  source: /note="Description of Artificial Sequence: Synthetic oligonucleotide"
uuuuugggaaagccacugauuuu

SEQ ID NO: 3144 - RNA, 23 nt, Artificial Sequence
  source: /note="Description of Artificial Sequence: Synthetic oligonucleotide"
agacaauuuuugguguuuuaagg

SEQ ID NO: 3145 - RNA, 23 nt, Artificial Sequence
  source: /note="Description of Artificial Sequence: Synthetic oligonucleotide"
uuuaagaagauucacaaucagcu

SEQ ID NO: 3146 - RNA, 23 nt, Artificial Sequence
  source: /note="Description of Artificial Sequence: Synthetic oligonucleotide"
uuucacuguucaagguuuuauuu

SEQ ID NO: 3147 - RNA, 23 nt, Artificial Sequence
  source: /note="Description of Artificial Sequence: Synthetic oligonucleotide"
uguuuuauuuggcaugacacuug

SEQ ID NO: 3148 - RNA, 23 nt, Artificial Sequence
  source: /note="Description of Artificial Sequence: Synthetic oligonucleotide"
ucuggagacaauuuuugguguuu

SEQ ID NO: 3149 - RNA, 23 nt, Artificial Sequence
  source: /note="Description of Artificial Sequence: Synthetic oligonucleotide"
ucucacauaauauugcaaugcac

SEQ ID NO: 3150 - RNA, 23 nt, Artificial Sequence
  source: /note="Description of Artificial Sequence: Synthetic oligonucleotide"
uaagguuuuauuuggcaugacac

SEQ ID NO: 3151 - RNA, 23 nt, Artificial Sequence
  source: /note="Description of Artificial Sequence: Synthetic oligonucleotide"
uaacauuuaugcacaagauaugc

SEQ ID NO: 3152 - RNA, 23 nt, Artificial Sequence
  source: /note="Description of Artificial Sequence: Synthetic oligonucleotide"
uggagacaauuuuugguguuuua

SEQ ID NO: 3153 - RNA, 23 nt, Artificial Sequence
  source: /note="Description of Artificial Sequence: Synthetic oligonucleotide"
uuacacacuggagccagguuaua

SEQ ID NO: 3154 - RNA, 23 nt, Artificial Sequence
  source: /note="Description of Artificial Sequence: Synthetic oligonucleotide"
uauuuaugcacaagauaugcauc

SEQ ID NO: 3155 - RNA, 23 nt, Artificial Sequence
  source: /note="Description of Artificial Sequence: Synthetic oligonucleotide"
uuggacuguacuugacaauguug

SEQ ID NO: 3156 - RNA, 23 nt, Artificial Sequence
  source: /note="Description of Artificial Sequence: Synthetic oligonucleotide"
uuuuuuucacuguucaagguuuu

SEQ ID NO: 3157 - RNA, 23 nt, Artificial Sequence
  source: /note="Description of Artificial Sequence: Synthetic oligonucleotide"
acauaauauugcaaugcacacua

SEQ ID NO: 3158 - RNA, 23 nt, Artificial Sequence
  source: /note="Description of Artificial Sequence: Synthetic oligonucleotide"
uuccaauuacucgguuuuuggga

SEQ ID NO: 3159 - RNA, 23 nt, Artificial Sequence
  source: /note="Description of Artificial Sequence: Synthetic oligonucleotide"
uuuccaauuacucgguuuuuggg

SEQ ID NO: 3160 - RNA, 23 nt, Artificial Sequence
  source: /note="Description of Artificial Sequence: Synthetic oligonucleotide"
uacuacacaaguaccacuuggca

SEQ ID NO: 3161 - RNA, 23 nt, Artificial Sequence
  source: /note="Description of Artificial Sequence: Synthetic oligonucleotide"
uaagauguucacguuucgcugga

SEQ ID NO: 3162 - RNA, 23 nt, Artificial Sequence
  source: /note="Description of Artificial Sequence: Synthetic oligonucleotide"
ucuuaagaagauucacaaucagc

SEQ ID NO: 3163 - RNA, 23 nt, Artificial Sequence
  source: /note="Description of Artificial Sequence: Synthetic oligonucleotide"
uugggaaugaugaacuugaagau

SEQ ID NO: 3164 - RNA, 23 nt, Artificial Sequence
  source: /note="Description of Artificial Sequence: Synthetic oligonucleotide"
agauucacaaucagcugguccuu

SEQ ID NO: 3165 - RNA, 23 nt, Artificial Sequence
  source: /note="Description of Artificial Sequence: Synthetic oligonucleotide"
uuucaagguuuuauuuggcauga

SEQ ID NO: 3166 - RNA, 23 nt, Artificial Sequence
  source: /note="Description of Artificial Sequence: Synthetic oligonucleotide"
aaaacaccaaaaauugucuccag

SEQ ID NO: 3167 - RNA, 23 nt, Artificial Sequence
  source: /note="Description of Artificial Sequence: Synthetic oligonucleotide"
aaaaaccgaguaauuggaagugg

SEQ ID NO: 3168 - RNA, 23 nt, Artificial Sequence
  source: /note="Description of Artificial Sequence: Synthetic oligonucleotide"
gaaaaucaguggcuuucccaaaa

SEQ ID NO: 3169 - RNA, 23 nt, Artificial Sequence
  source: /note="Description of Artificial Sequence: Synthetic oligonucleotide"
auucccaacauugucaaguacag

SEQ ID NO: 3170 - RNA, 23 nt, Artificial Sequence
  source: /note="Description of Artificial Sequence: Synthetic oligonucleotide"
cuugugccaucaguaucuuaaug

SEQ ID NO: 3171 - RNA, 23 nt, Artificial Sequence
  source: /note="Description of Artificial Sequence: Synthetic oligonucleotide"
aaaaauugucuccagcaaagacu

SEQ ID NO: 3172 - RNA, 23 nt, Artificial Sequence
  source: /note="Description of Artificial Sequence: Synthetic oligonucleotide"
aaaccuugaacagugaaaaaaaa

SEQ ID NO: 3173 - RNA, 23 nt, Artificial Sequence
  source: /note="Description of Artificial Sequence: Synthetic oligonucleotide"
uuaaaacaccaaaaauugucucc

SEQ ID NO: 3174 - RNA, 23 nt, Artificial Sequence
  source: /note="Description of Artificial Sequence: Synthetic oligonucleotide"
acaccaaaaauugucuccagcaa

SEQ ID NO: 3175 - RNA, 23 nt, Artificial Sequence
  source: /note="Description of Artificial Sequence: Synthetic oligonucleotide"
uucaaguucaucauucccaacau

SEQ ID NO: 3176 - RNA, 23 nt, Artificial Sequence
  source: /note="Description of Artificial Sequence: Synthetic oligonucleotide"
uugcaauauuaugugagauguaa

SEQ ID NO: 3177 - RNA, 23 nt, Artificial Sequence
  source: /note="Description of Artificial Sequence: Synthetic oligonucleotide"
cggucucaaaagauucaaagucc

SEQ ID NO: 3178 - RNA, 23 nt, Artificial Sequence
  source: /note="Description of Artificial Sequence: Synthetic oligonucleotide"
aucauucccaacauugucaagua

SEQ ID NO: 3179 - RNA, 23 nt, Artificial Sequence
  source: /note="Description of Artificial Sequence: Synthetic oligonucleotide"
uaaaaccuugaacagugaaaaaa

SEQ ID NO: 3180 - RNA, 23 nt, Artificial Sequence
  source: /note="Description of Artificial Sequence: Synthetic oligonucleotide"
ucucaaaagauucaaaguccaag

SEQ ID NO: 3181 - RNA, 23 nt, Artificial Sequence
  source: /note="Description of Artificial Sequence: Synthetic oligonucleotide"
gaacaucuucaaguucaucauuc

SEQ ID NO: 3182 - RNA, 23 nt, Artificial Sequence
  source: /note="Description of Artificial Sequence: Synthetic oligonucleotide"
accagcugauugugaaucuucuu

SEQ ID NO: 3183 - RNA, 23 nt, Artificial Sequence
  source: /note="Description of Artificial Sequence: Synthetic oligonucleotide"
gucucaaaagauucaaaguccaa

SEQ ID NO: 3184 - RNA, 23 nt, Artificial Sequence
  source: /note="Description of Artificial Sequence: Synthetic oligonucleotide"
caaaaaccgaguaauuggaagug

SEQ ID NO: 3185 - RNA, 23 nt, Artificial Sequence
  source: /note="Description of Artificial Sequence: Synthetic oligonucleotide"
caugaugcauaucuugugcauaa

SEQ ID NO: 3186 - RNA, 23 nt, Artificial Sequence
  source: /note="Description of Artificial Sequence: Synthetic oligonucleotide"
ugccaucaguaucuuaaugaagg

SEQ ID NO: 3187 - RNA, 23 nt, Artificial Sequence
  source: /note="Description of Artificial Sequence: Synthetic oligonucleotide"
aaaaucaguggcuuucccaaaaa

SEQ ID NO: 3188 - RNA, 23 nt, Artificial Sequence
  source: /note="Description of Artificial Sequence: Synthetic oligonucleotide"
ccuuaaaacaccaaaaauugucu

SEQ ID NO: 3189 - RNA, 23 nt, Artificial Sequence
  source: /note="Description of Artificial Sequence: Synthetic oligonucleotide"
agcugauugugaaucuucuuaag

SEQ ID NO: 3190 - RNA, 23 nt, Artificial Sequence
  source: /note="Description of Artificial Sequence: Synthetic oligonucleotide"
aaauaaaaccuugaacagugaaa

SEQ ID NO: 3191 - RNA, 23 nt, Artificial Sequence
  source: /note="Description of Artificial Sequence: Synthetic oligonucleotide"
caagugucaugccaaauaaaacc

SEQ ID NO: 3192 - RNA, 23 nt, Artificial Sequence
  source: /note="Description of Artificial Sequence: Synthetic oligonucleotide"
aaacaccaaaaauugucuccagc

SEQ ID NO: 3193 - RNA, 23 nt, Artificial Sequence
  source: /note="Description of Artificial Sequence: Synthetic oligonucleotide"
gugcauugcaauauuaugugaga

SEQ ID NO: 3194 - RNA, 23 nt, Artificial Sequence
  source: /note="Description of Artificial Sequence: Synthetic oligonucleotide"
gugucaugccaaauaaaaccuug

SEQ ID NO: 3195 - RNA, 23 nt, Artificial Sequence
  source: /note="Description of Artificial Sequence: Synthetic oligonucleotide"
gcauaucuugugcauaaauguug

SEQ ID NO: 3196 - RNA, 23 nt, Artificial Sequence
  source: /note="Description of Artificial Sequence: Synthetic oligonucleotide"
uaaaacaccaaaaauugucucca

SEQ ID NO: 3197 - RNA, 23 nt, Artificial Sequence
  source: /note="Description of Artificial Sequence: Synthetic oligonucleotide"
uauaaccuggcuccaguguguac

SEQ ID NO: 3198 - RNA, 23 nt, Artificial Sequence
  source: /note="Description of Artificial Sequence: Synthetic oligonucleotide"
gaugcauaucuugugcauaaaug

SEQ ID NO: 3199 - RNA, 23 nt, Artificial Sequence
  source: /note="Description of Artificial Sequence: Synthetic oligonucleotide"
caacauugucaaguacaguccac

SEQ ID NO: 3200 - RNA, 23 nt, Artificial Sequence
  source: /note="Description of Artificial Sequence: Synthetic oligonucleotide"
aaaaccuugaacagugaaaaaaa

SEQ ID NO: 3201 - RNA, 23 nt, Artificial Sequence
  source: /note="Description of Artificial Sequence: Synthetic oligonucleotide"
uagugugcauugcaauauuaugu

SEQ ID NO: 3202 - RNA, 23 nt, Artificial Sequence
  source: /note="Description of Artificial Sequence: Synthetic oligonucleotide"
ucccaaaaaccgaguaauuggaa

SEQ ID NO: 3203 - RNA, 23 nt, Artificial Sequence
  source: /note="Description of Artificial Sequence: Synthetic oligonucleotide"
cccaaaaaccgaguaauuggaag

SEQ ID NO: 3204 - RNA, 23 nt, Artificial Sequence
  source: /note="Description of Artificial Sequence: Synthetic oligonucleotide"
ugccaagugguacuuguguagug

SEQ ID NO: 3205 - RNA, 23 nt, Artificial Sequence
  source: /note="Description of Artificial Sequence: Synthetic oligonucleotide"
uccagcgaaacgugaacaucuuc

SEQ ID NO: 3206 - RNA, 23 nt, Artificial Sequence
  source: /note="Description of Artificial Sequence: Synthetic oligonucleotide"
gcugauugugaaucuucuuaagg

SEQ ID NO: 3207 - RNA, 23 nt, Artificial Sequence
  source: /note="Description of Artificial Sequence: Synthetic oligonucleotide"
aucuucaaguucaucauucccaa

SEQ ID NO: 3208 - RNA, 23 nt, Artificial Sequence
  source: /note="Description of Artificial Sequence: Synthetic oligonucleotide"
aaggaccagcugauugugaaucu

SEQ ID NO: 3209 - RNA, 23 nt, Artificial Sequence
  source: /note="Description of Artificial Sequence: Synthetic oligonucleotide"
ucaugccaaauaaaaccuugaac

SEQ ID NO: 3210 - RNA, 21 nt, Artificial Sequence
  source: /note="Description of Artificial Sequence: Synthetic oligonucleotide"
uuuaucugaucugugauuaaa

SEQ ID NO: 3211 - RNA, 21 nt, Artificial Sequence
  source: /note="Description of Artificial Sequence: Synthetic oligonucleotide"
acugguuagugugaaauaguu

SEQ ID NO: 3212 - RNA, 21 nt, Artificial Sequence
  source: /note="Description of Artificial Sequence: Synthetic oligonucleotide"
aacaugccuaguccaacauuu

SEQ ID NO: 3213 - RNA, 21 nt, Artificial Sequence
  source: /note="Description of Artificial Sequence: Synthetic oligonucleotide"
caaguccaauauggcaacucu

SEQ ID NO: 3214 - RNA, 21 nt, Artificial Sequence
  source: /note="Description of Artificial Sequence: Synthetic oligonucleotide"
uccaccaugauuaagggucuu

SEQ ID NO: 3215 - RNA, 21 nt, Artificial Sequence
  source: /note="Description of Artificial Sequence: Synthetic oligonucleotide"
ucauuucacugucuaggcuaa

SEQ ID NO: 3216 - RNA, 21 nt, Artificial Sequence
  source: /note="Description of Artificial Sequence: Synthetic oligonucleotide"
uguccuuuuuaucugaucugu

SEQ ID NO: 3217 - RNA, 21 nt, Artificial Sequence
  source: /note="Description of Artificial Sequence: Synthetic oligonucleotide"
ccaguguauaaauccaauaua

SEQ ID NO: 3218 - RNA, 21 nt, Artificial Sequence
  source: /note="Description of Artificial Sequence: Synthetic oligonucleotide"
uccaaguguuauaccaacuaa

SEQ ID NO: 3219 - RNA, 21 nt, Artificial Sequence
  source: /note="Description of Artificial Sequence: Synthetic oligonucleotide"
gucaucgaagacaaauugaaa

SEQ ID NO: 3220 - RNA, 21 nt, Artificial Sequence
  source: /note="Description of Artificial Sequence: Synthetic oligonucleotide"
gaacaccaaagauugucucua

SEQ ID NO: 3221 - RNA, 21 nt, Artificial Sequence
  source: /note="Description of Artificial Sequence: Synthetic oligonucleotide"
aacaccaaagauugucucuga

SEQ ID NO: 3222 - RNA, 21 nt, Artificial Sequence
  source: /note="Description of Artificial Sequence: Synthetic oligonucleotide"
auguuguccuuuuuaucugau

SEQ ID NO: 3223 - RNA, 21 nt, Artificial Sequence
  source: /note="Description of Artificial Sequence: Synthetic oligonucleotide"
ucaacuccugaaguuagaaau

SEQ ID NO: 3224 - RNA, 21 nt, Artificial Sequence
  source: /note="Description of Artificial Sequence: Synthetic oligonucleotide"
aacuauccaaguguuauacca

SEQ ID NO: 3225 - RNA, 21 nt, Artificial Sequence
  source: /note="Description of Artificial Sequence: Synthetic oligonucleotide"
uccuuagaacaccaaagauua

SEQ ID NO: 3226 - RNA, 21 nt, Artificial Sequence
  source: /note="Description of Artificial Sequence: Synthetic oligonucleotide"
gguauuaaucuuguguagucu

SEQ ID NO: 3227 - RNA, 21 nt, Artificial Sequence
  source: /note="Description of Artificial Sequence: Synthetic oligonucleotide"
ggcuccuucacugaacaugca

SEQ ID NO: 3228 - RNA, 21 nt, Artificial Sequence
  source: /note="Description of Artificial Sequence: Synthetic oligonucleotide"
uaucaguaguguacauuacca

SEQ ID NO: 3229 - RNA, 21 nt, Artificial Sequence
  source: /note="Description of Artificial Sequence: Synthetic oligonucleotide"
cagccuuuuccuuagaacaca

SEQ ID NO: 3230 - RNA, 21 nt, Artificial Sequence
  source: /note="Description of Artificial Sequence: Synthetic oligonucleotide"
cugguuagugugaaauaguua

SEQ ID NO: 3231 - RNA, 21 nt, Artificial Sequence
  source: /note="Description of Artificial Sequence: Synthetic oligonucleotide"
acuauaucaguaguguacauu

SEQ ID NO: 3232 - RNA, 21 nt, Artificial Sequence
  source: /note="Description of Artificial Sequence: Synthetic oligonucleotide"
uauaucaguaguguacauuaa

SEQ ID NO: 3233 - RNA, 21 nt, Artificial Sequence
  source: /note="Description of Artificial Sequence: Synthetic oligonucleotide"
guaauauuuuaagauggacua

SEQ ID NO: 3234 - RNA, 21 nt, Artificial Sequence
  source: /note="Description of Artificial Sequence: Synthetic oligonucleotide"
uuuuaagauggacugggaaaa

SEQ ID NO: 3235 - RNA, 21 nt, Artificial Sequence
  source: /note="Description of Artificial Sequence: Synthetic oligonucleotide"
ugguuagugugaaauaguucu

SEQ ID NO: 3236 - RNA, 21 nt, Artificial Sequence
  source: /note="Description of Artificial Sequence: Synthetic oligonucleotide"
uucacugaacaugccuaguca

SEQ ID NO: 3237 - RNA, 21 nt, Artificial Sequence
  source: /note="Description of Artificial Sequence: Synthetic oligonucleotide"
accaacuauccaaguguuaua

SEQ ID NO: 3238 - RNA, 21 nt, Artificial Sequence
  source: /note="Description of Artificial Sequence: Synthetic oligonucleotide"
ccaaguguuauaccaacuaaa

SEQ ID NO: 3239 - RNA, 21 nt, Artificial Sequence
  source: /note="Description of Artificial Sequence: Synthetic oligonucleotide"
uuccuuuugguuccaagucca

SEQ ID NO: 3240 - RNA, 21 nt, Artificial Sequence
  source: /note="Description of Artificial Sequence: Synthetic oligonucleotide"
gcagccuuuuccuuagaacaa

SEQ ID NO: 3241 - RNA, 21 nt, Artificial Sequence
  source: /note="Description of Artificial Sequence: Synthetic oligonucleotide"
aguaauauuuuaagauggacu

SEQ ID NO: 3242 - RNA, 21 nt, Artificial Sequence
  source: /note="Description of Artificial Sequence: Synthetic oligonucleotide"
aaaauccacagcuauauccua

SEQ ID NO: 3243 - RNA, 21 nt, Artificial Sequence
  source: /note="Description of Artificial Sequence: Synthetic oligonucleotide"
uccuucacugaacaugccuaa

SEQ ID NO: 3244 - RNA, 21 nt, Artificial Sequence
  source: /note="Description of Artificial Sequence: Synthetic oligonucleotide"
cacugaacaugccuaguccaa

SEQ ID NO: 3245 - RNA, 21 nt, Artificial Sequence
  source: /note="Description of Artificial Sequence: Synthetic oligonucleotide"
aaguguuauaccaacuaaaac

SEQ ID NO: 3246 - RNA, 21 nt, Artificial Sequence
  source: /note="Description of Artificial Sequence: Synthetic oligonucleotide"
uuccaccaugauuaagggucu

SEQ ID NO: 3247 - RNA, 21 nt, Artificial Sequence
  source: /note="Description of Artificial Sequence: Synthetic oligonucleotide"
gaacaugccuaguccaacauu

SEQ ID NO: 3248 - RNA, 21 nt, Artificial Sequence
  source: /note="Description of Artificial Sequence: Synthetic oligonucleotide"
aucaguaguguacauuaccau

SEQ ID NO: 3249 - RNA, 21 nt, Artificial Sequence
  source: /note="Description of Artificial Sequence: Synthetic oligonucleotide"
auccaaguguuauaccaacua

SEQ ID NO: 3250 - RNA, 21 nt, Artificial Sequence
  source: /note="Description of Artificial Sequence: Synthetic oligonucleotide"
ccaaguccaauauggcaacua

SEQ ID NO: 3251 - RNA, 21 nt, Artificial Sequence
  source: /note="Description of Artificial Sequence: Synthetic oligonucleotide"
aucucagaccuugugaaggua

SEQ ID NO: 3252 - RNA, 21 nt, Artificial Sequence
  source: /note="Description of Artificial Sequence: Synthetic oligonucleotide"
cauuucacugucuaggcuaca

SEQ ID NO: 3253 - RNA, 21 nt, Artificial Sequence
  source: /note="Description of Artificial Sequence: Synthetic oligonucleotide"
ccacagcuauauccugaugcu

SEQ ID NO: 3254 - RNA, 21 nt, Artificial Sequence
  source: /note="Description of Artificial Sequence: Synthetic oligonucleotide"
cuucacugaacaugccuagua

SEQ ID NO: 3255 - RNA, 21 nt, Artificial Sequence
  source: /note="Description of Artificial Sequence: Synthetic oligonucleotide"
gugguugagagugcuuaugaa

SEQ ID NO: 3256 - RNA, 21 nt, Artificial Sequence
  source: /note="Description of Artificial Sequence: Synthetic oligonucleotide"
caaacucaaaggcuacacaua

SEQ ID NO: 3257 - RNA, 21 nt, Artificial Sequence
  source: /note="Description of Artificial Sequence: Synthetic oligonucleotide"
auaucaguaguguacauuaca

SEQ ID NO: 3258 - RNA, 21 nt, Artificial Sequence
  source: /note="Description of Artificial Sequence: Synthetic oligonucleotide"
caaccaacuauccaaguguua

SEQ ID NO: 3259 - RNA, 21 nt, Artificial Sequence
  source: /note="Description of Artificial Sequence: Synthetic oligonucleotide"
ucaucgaagacaaauugaaga

SEQ ID NO: 3260 - RNA, 21 nt, Artificial Sequence
  source: /note="Description of Artificial Sequence: Synthetic oligonucleotide"
gcagauuuggcagagaguaua

SEQ ID NO: 3261 - RNA, 21 nt, Artificial Sequence
  source: /note="Description of Artificial Sequence: Synthetic oligonucleotide"
cuccuucacugaacaugccua

SEQ ID NO: 3262 - RNA, 21 nt, Artificial Sequence
  source: /note="Description of Artificial Sequence: Synthetic oligonucleotide"
caugccuaguccaacauuuuu

SEQ ID NO: 3263 - RNA, 21 nt, Artificial Sequence
  source: /note="Description of Artificial Sequence: Synthetic oligonucleotide"
ugccaucaguaucuuaaugaa

SEQ ID NO: 3264 - RNA, 21 nt, Artificial Sequence
  source: /note="Description of Artificial Sequence: Synthetic oligonucleotide"
gccaucaguaucuuaaugaaa

SEQ ID NO: 3265 - RNA, 21 nt, Artificial Sequence
  source: /note="Description of Artificial Sequence: Synthetic oligonucleotide"
uuagaacaccaaagauugucu

SEQ ID NO: 3266 - RNA, 21 nt, Artificial Sequence
  source: /note="Description of Artificial Sequence: Synthetic oligonucleotide"
aucauuucacugucuaggcua

SEQ ID NO: 3267 - RNA, 21 nt, Artificial Sequence
  source: /note="Description of Artificial Sequence: Synthetic oligonucleotide"
ucacugucuaggcuacaacaa

SEQ ID NO: 3268 - RNA, 21 nt, Artificial Sequence
  source: /note="Description of Artificial Sequence: Synthetic oligonucleotide"
ggauccaguguauaaauccaa

SEQ ID NO: 3269 - RNA, 21 nt, Artificial Sequence
  source: /note="Description of Artificial Sequence: Synthetic oligonucleotide"
caacuauccaaguguuauaca

SEQ ID NO: 3270 - RNA, 21 nt, Artificial Sequence
  source: /note="Description of Artificial Sequence: Synthetic oligonucleotide"
uugguuccaaguccaauauga

SEQ ID NO: 3271 - RNA, 21 nt, Artificial Sequence
  source: /note="Description of Artificial Sequence: Synthetic oligonucleotide"
ugcuuaugaggugaucaaacu

SEQ ID NO: 3272 - RNA, 21 nt, Artificial Sequence
  source: /note="Description of Artificial Sequence: Synthetic oligonucleotide"
aaacucaaaggcuacacauca

SEQ ID NO: 3273 - RNA, 21 nt, Artificial Sequence
  source: /note="Description of Artificial Sequence: Synthetic oligonucleotide"
ucucagaccuugugaagguga

SEQ ID NO: 3274 - RNA, 21 nt, Artificial Sequence
  source: /note="Description of Artificial Sequence: Synthetic oligonucleotide"
uaaaauccacagcuauauccu

SEQ ID NO: 3275 - RNA, 21 nt, Artificial Sequence
  source: /note="Description of Artificial Sequence: Synthetic oligonucleotide"
ccuucacugaacaugccuagu

SEQ ID NO: 3276 - RNA, 21 nt, Artificial Sequence
  source: /note="Description of Artificial Sequence: Synthetic oligonucleotide"
gggauccaguguauaaaucca

SEQ ID NO: 3277 - RNA, 21 nt, Artificial Sequence
  source: /note="Description of Artificial Sequence: Synthetic oligonucleotide"
caauaaaccuugaacagugaa

SEQ ID NO: 3278 - RNA, 21 nt, Artificial Sequence
  source: /note="Description of Artificial Sequence: Synthetic oligonucleotide"
ggccugugccaucaguaucuu

SEQ ID NO: 3279 - RNA, 21 nt, Artificial Sequence
  source: /note="Description of Artificial Sequence: Synthetic oligonucleotide"
uuguugaugucaucgaagaca

SEQ ID NO: 3280 - RNA, 21 nt, Artificial Sequence
  source: /note="Description of Artificial Sequence: Synthetic oligonucleotide"
ggaucuuauuuugugaacuau

SEQ ID NO: 3281 - RNA, 21 nt, Artificial Sequence
  source: /note="Description of Artificial Sequence: Synthetic oligonucleotide"
aaggaucuuauuuugugaacu

SEQ ID NO: 3282 - RNA, 21 nt, Artificial Sequence
  source: /note="Description of Artificial Sequence: Synthetic oligonucleotide"
aucaugucuugugcauaauua

SEQ ID NO: 3283 - RNA, 21 nt, Artificial Sequence
  source: /note="Description of Artificial Sequence: Synthetic oligonucleotide"
ugucauaucauuucacugucu

SEQ ID NO: 3284 - RNA, 21 nt, Artificial Sequence
  source: /note="Description of Artificial Sequence: Synthetic oligonucleotide"
ucauaucauuucacugucuaa

SEQ ID NO: 3285 - RNA, 21 nt, Artificial Sequence
  source: /note="Description of Artificial Sequence: Synthetic oligonucleotide"
auuuauaaucuucuaaaggaa

SEQ ID NO: 3286 - RNA, 21 nt, Artificial Sequence
  source: /note="Description of Artificial Sequence: Synthetic oligonucleotide"
ugguuuguaaaauccacagcu

SEQ ID NO: 3287 - RNA, 21 nt, Artificial Sequence
  source: /note="Description of Artificial Sequence: Synthetic oligonucleotide"
augcuggaugguauuaaucuu

SEQ ID NO: 3288 - RNA, 21 nt, Artificial Sequence
  source: /note="Description of Artificial Sequence: Synthetic oligonucleotide"
aacuauaucaguaguguacau

SEQ ID NO: 3289 - RNA, 21 nt, Artificial Sequence
  source: /note="Description of Artificial Sequence: Synthetic oligonucleotide"
aucaacuccugaaguuagaaa

SEQ ID NO: 3290 - RNA, 21 nt, Artificial Sequence
  source: /note="Description of Artificial Sequence: Synthetic oligonucleotide"
cuggaugguauuaaucuugua

SEQ ID NO: 3291 - RNA, 21 nt, Artificial Sequence
  source: /note="Description of Artificial Sequence: Synthetic oligonucleotide"
uaucauuucacugucuaggcu

SEQ ID NO: 3292 - RNA, 21 nt, Artificial Sequence
  source: /note="Description of Artificial Sequence: Synthetic oligonucleotide"
guaaaauccacagcuauauca

SEQ ID NO: 3293 - RNA, 21 nt, Artificial Sequence
  source: /note="Description of Artificial Sequence: Synthetic oligonucleotide"
uccuuaguguuccuugcauuu

SEQ ID NO: 3294 - RNA, 21 nt, Artificial Sequence
  source: /note="Description of Artificial Sequence: Synthetic oligonucleotide"
cauaucauuucacugucuaga

SEQ ID NO: 3295 - RNA, 21 nt, Artificial Sequence
  source: /note="Description of Artificial Sequence: Synthetic oligonucleotide"
aacaucaacuccugaaguuaa

SEQ ID NO: 3296 - RNA, 21 nt, Artificial Sequence
  source: /note="Description of Artificial Sequence: Synthetic oligonucleotide"
ccugaugcuggaugguauuaa

SEQ ID NO: 3297 - RNA, 21 nt, Artificial Sequence
  source: /note="Description of Artificial Sequence: Synthetic oligonucleotide"
aaugcaaccaacuauccaagu

SEQ ID NO: 3298 - RNA, 21 nt, Artificial Sequence
  source: /note="Description of Artificial Sequence: Synthetic oligonucleotide"
uuuacggaauaaaggaugaua

SEQ ID NO: 3299 - RNA, 21 nt, Artificial Sequence
  source: /note="Description of Artificial Sequence: Synthetic oligonucleotide"
uuccuuaguguuccuugcauu

SEQ ID NO: 3300 - RNA, 21 nt, Artificial Sequence
  source: /note="Description of Artificial Sequence: Synthetic oligonucleotide"
caaugcaaccaacuauccaaa

SEQ ID NO: 3301 - RNA, 21 nt, Artificial Sequence
  source: /note="Description of Artificial Sequence: Synthetic oligonucleotide"
agauuuggcagagaguauaau

SEQ ID NO: 3302 - RNA, 21 nt, Artificial Sequence
  source: /note="Description of Artificial Sequence: Synthetic oligonucleotide"
uuuccaccaugauuaagggua

SEQ ID NO: 3303 - RNA, 21 nt, Artificial Sequence
  source: /note="Description of Artificial Sequence: Synthetic oligonucleotide"
acugguuagugugaaauaguu

SEQ ID NO: 3304 - RNA, 21 nt, Artificial Sequence
  source: /note="Description of Artificial Sequence: Synthetic oligonucleotide"
caaguccaauauggcaacucu

SEQ ID NO: 3305 - RNA, 21 nt, Artificial Sequence
  source: /note="Description of Artificial Sequence: Synthetic oligonucleotide"
uccaccaugauuaagggucuu

SEQ ID NO: 3306 - RNA, 21 nt, Artificial Sequence
  source: /note="Description of Artificial Sequence: Synthetic oligonucleotide"
ucauuucacugucuaggcuaa

SEQ ID NO: 3307 - RNA, 21 nt, Artificial Sequence
  source: /note="Description of Artificial Sequence: Synthetic oligonucleotide"
uguccuuuuuaucugaucugu

SEQ ID NO: 3308 - RNA, 21 nt, Artificial Sequence
  source: /note="Description of Artificial Sequence: Synthetic oligonucleotide"
ccaguguauaaauccaauaua

SEQ ID NO: 3309 - RNA, 21 nt, Artificial Sequence
  source: /note="Description of Artificial Sequence: Synthetic oligonucleotide"
uccaaguguuauaccaacuaa

SEQ ID NO: 3310 - RNA, 21 nt, Artificial Sequence
  source: /note="Description of Artificial Sequence: Synthetic oligonucleotide"
gaacaccaaagauugucucua

SEQ ID NO: 3311 - RNA, 21 nt, Artificial Sequence
  source: /note="Description of Artificial Sequence: Synthetic oligonucleotide"
aacaccaaagauugucucuga

SEQ ID NO: 3312 - RNA, 21 nt, Artificial Sequence
  source: /note="Description of Artificial Sequence: Synthetic oligonucleotide"
auguuguccuuuuuaucugau

SEQ ID NO: 3313 - RNA, 21 nt, Artificial Sequence
  source: /note="Description of Artificial Sequence: Synthetic oligonucleotide"
ucaacuccugaaguuagaaau

SEQ ID NO: 3314 - RNA, 21 nt, Artificial Sequence
  source: /note="Description of Artificial Sequence: Synthetic oligonucleotide"
aacuauccaaguguuauacca

SEQ ID NO: 3315 - RNA, 21 nt, Artificial Sequence
  source: /note="Description of Artificial Sequence: Synthetic oligonucleotide"
gguauuaaucuuguguagucu

SEQ ID NO: 3316 - RNA, 21 nt, Artificial Sequence
  source: /note="Description of Artificial Sequence: Synthetic oligonucleotide"
ggcuccuucacugaacaugca

SEQ ID NO: 3317 - RNA, 21 nt, Artificial Sequence
  source: /note="Description of Artificial Sequence: Synthetic oligonucleotide"
uaucaguaguguacauuacca

SEQ ID NO: 3318 - RNA, 21 nt, Artificial Sequence
  source: /note="Description of Artificial Sequence: Synthetic oligonucleotide"
cagccuuuuccuuagaacaca

SEQ ID NO: 3319 - RNA, 21 nt, Artificial Sequence
  source: /note="Description of Artificial Sequence: Synthetic oligonucleotide"
cugguuagugugaaauaguua

SEQ ID NO: 3320 - RNA, 21 nt, Artificial Sequence
  source: /note="Description of Artificial Sequence: Synthetic oligonucleotide"
acuauaucaguaguguacauu

SEQ ID NO: 3321 - RNA, 21 nt, Artificial Sequence
  source: /note="Description of Artificial Sequence: Synthetic oligonucleotide"
uauaucaguaguguacauuaa

SEQ ID NO: 3322 - RNA, 21 nt, Artificial Sequence
  source: /note="Description of Artificial Sequence: Synthetic oligonucleotide"
guaauauuuuaagauggacua

SEQ ID NO: 3323 - RNA, 21 nt, Artificial Sequence
  source: /note="Description of Artificial Sequence: Synthetic oligonucleotide"
uuuuaagauggacugggaaaa

SEQ ID NO: 3324 - RNA, 21 nt, Artificial Sequence
  source: /note="Description of Artificial Sequence: Synthetic oligonucleotide"
uucacugaacaugccuaguca

SEQ ID NO: 3325 - RNA, 21 nt, Artificial Sequence
  source: /note="Description of Artificial Sequence: Synthetic oligonucleotide"
accaacuauccaaguguuaua

SEQ ID NO: 3326 - RNA, 21 nt, Artificial Sequence
  source: /note="Description of Artificial Sequence: Synthetic oligonucleotide"
ccaaguguuauaccaacuaaa

SEQ ID NO: 3327 - RNA, 21 nt, Artificial Sequence
  source: /note="Description of Artificial Sequence: Synthetic oligonucleotide"
aguaauauuuuaagauggacu

SEQ ID NO: 3328 - RNA, 21 nt, Artificial Sequence
  source: /note="Description of Artificial Sequence: Synthetic oligonucleotide"
aaaauccacagcuauauccua

SEQ ID NO: 3329 - RNA, 21 nt, Artificial Sequence
  source: /note="Description of Artificial Sequence: Synthetic oligonucleotide"
uccuucacugaacaugccuaa

SEQ ID NO: 3330 - RNA, 21 nt, Artificial Sequence
  source: /note="Description of Artificial Sequence: Synthetic oligonucleotide"
cacugaacaugccuaguccaa

SEQ ID NO: 3331 - RNA, 21 nt, Artificial Sequence
  source: /note="Description of Artificial Sequence: Synthetic oligonucleotide"
aaguguuauaccaacuaaaac

SEQ ID NO: 3332 - RNA, 21 nt, Artificial Sequence
  source: /note="Description of Artificial Sequence: Synthetic oligonucleotide"
uuccaccaugauuaagggucu

SEQ ID NO: 3333 - RNA, 21 nt, Artificial Sequence
  source: /note="Description of Artificial Sequence: Synthetic oligonucleotide"
gaacaugccuaguccaacauu

SEQ ID NO: 3334 - RNA, 21 nt, Artificial Sequence
  source: /note="Description of Artificial Sequence: Synthetic oligonucleotide"
aucaguaguguacauuaccau

SEQ ID NO: 3335 - RNA, 21 nt, Artificial Sequence
  source: /note="Description of Artificial Sequence: Synthetic oligonucleotide"
auccaaguguuauaccaacua

SEQ ID NO: 3336 - RNA, 21 nt, Artificial Sequence
  source: /note="Description of Artificial Sequence: Synthetic oligonucleotide"
ccaaguccaauauggcaacua

SEQ ID NO: 3337 - RNA, 21 nt, Artificial Sequence
  source: /note="Description of Artificial Sequence: Synthetic oligonucleotide"
cauuucacugucuaggcuaca

SEQ ID NO: 3338 - RNA, 21 nt, Artificial Sequence
  source: /note="Description of Artificial Sequence: Synthetic oligonucleotide"
ccacagcuauauccugaugcu

SEQ ID NO: 3339 - RNA, 21 nt, Artificial Sequence
  source: /note="Description of Artificial Sequence: Synthetic oligonucleotide"
cuucacugaacaugccuagua

SEQ ID NO: 3340 - RNA, 21 nt, Artificial Sequence
  source: /note="Description of Artificial Sequence: Synthetic oligonucleotide"
gugguugagagugcuuaugaa

SEQ ID NO: 3341 - RNA, 21 nt, Artificial Sequence
  source: /note="Description of Artificial Sequence: Synthetic oligonucleotide"
auaucaguaguguacauuaca

SEQ ID NO: 3342 - RNA, 21 nt, Artificial Sequence
  source: /note="Description of Artificial Sequence: Synthetic oligonucleotide"
caaccaacuauccaaguguua

SEQ ID NO: 3343 - RNA, 21 nt, Artificial Sequence
  source: /note="Description of Artificial Sequence: Synthetic oligonucleotide"
gcagauuuggcagagaguaua

SEQ ID NO: 3344 - RNA, 21 nt, Artificial Sequence
  source: /note="Description of Artificial Sequence: Synthetic oligonucleotide"
cuccuucacugaacaugccua

SEQ ID NO: 3345 - RNA, 21 nt, Artificial Sequence
  source: /note="Description of Artificial Sequence: Synthetic oligonucleotide"
caugccuaguccaacauuuuu

SEQ ID NO: 3346 - RNA, 21 nt, Artificial Sequence
  source: /note="Description of Artificial Sequence: Synthetic oligonucleotide"
ugccaucaguaucuuaaugaa

SEQ ID NO: 3347 - RNA, 21 nt, Artificial Sequence
  source: /note="Description of Artificial Sequence: Synthetic oligonucleotide"
gccaucaguaucuuaaugaaa

SEQ ID NO: 3348 - RNA, 21 nt, Artificial Sequence
  source: /note="Description of Artificial Sequence: Synthetic oligonucleotide"
uuagaacaccaaagauugucu

SEQ ID NO: 3349 - RNA, 21 nt, Artificial Sequence
  source: /note="Description of Artificial Sequence: Synthetic oligonucleotide"
aucauuucacugucuaggcua

SEQ ID NO: 3350 - RNA, 21 nt, Artificial Sequence
  source: /note="Description of Artificial Sequence: Synthetic oligonucleotide"
ucacugucuaggcuacaacaa

SEQ ID NO: 3351 - RNA, 21 nt, Artificial Sequence
  source: /note="Description of Artificial Sequence: Synthetic oligonucleotide"
caacuauccaaguguuauaca

SEQ ID NO: 3352 - RNA, 21 nt, Artificial Sequence
  source: /note="Description of Artificial Sequence: Synthetic oligonucleotide"
uugguuccaaguccaauauga

SEQ ID NO: 3353 - RNA, 21 nt, Artificial Sequence
  source: /note="Description of Artificial Sequence: Synthetic oligonucleotide"
ugcuuaugaggugaucaaacu

SEQ ID NO: 3354 - RNA, 21 nt, Artificial Sequence
  source: /note="Description of Artificial Sequence: Synthetic oligonucleotide"
ucucagaccuugugaagguga

SEQ ID NO: 3355 - RNA, 21 nt, Artificial Sequence
  source: /note="Description of Artificial Sequence: Synthetic oligonucleotide"
uaaaauccacagcuauauccu

SEQ ID NO: 3356 - RNA, 21 nt, Artificial Sequence
  source: /note="Description of Artificial Sequence: Synthetic oligonucleotide"
ccuucacugaacaugccuagu

SEQ ID NO: 3357 - RNA, 21 nt, Artificial Sequence
  source: /note="Description of Artificial Sequence: Synthetic oligonucleotide"
gggauccaguguauaaaucca

SEQ ID NO: 3358 - RNA, 21 nt, Artificial Sequence
  source: /note="Description of Artificial Sequence: Synthetic oligonucleotide"
caauaaaccuugaacagugaa

SEQ ID NO: 3359 - RNA, 21 nt, Artificial Sequence
  source: /note="Description of Artificial Sequence: Synthetic oligonucleotide"
ggccugugccaucaguaucuu

SEQ ID NO: 3360 - RNA, 21 nt, Artificial Sequence
  source: /note="Description of Artificial Sequence: Synthetic oligonucleotide"
uuguugaugucaucgaagaca

SEQ ID NO: 3361 - RNA, 21 nt, Artificial Sequence
  source: /note="Description of Artificial Sequence: Synthetic oligonucleotide"
agauuuggcagagaguauaau

SEQ ID NO: 3362 - RNA, 21 nt, Artificial Sequence
  source: /note="Description of Artificial Sequence: Synthetic oligonucleotide"
uuuccaccaugauuaagggua

SEQ ID NO: 3363 - RNA, 21 nt, Artificial Sequence
  source: /note="Description of Artificial Sequence: Synthetic oligonucleotide"
cuaggcuacaacaggauucua

SEQ ID NO: 3364 - RNA, 21 nt, Artificial Sequence
  source: /note="Description of Artificial Sequence: Synthetic oligonucleotide"
uggagguugugcauguuguca

SEQ ID NO: 3365 - RNA, 21 nt, Artificial Sequence
  source: /note="Description of Artificial Sequence: Synthetic oligonucleotide"
gcuccuucacugaacaugccu

SEQ ID NO: 3366 - RNA, 21 nt, Artificial Sequence
  source: /note="Description of Artificial Sequence: Synthetic oligonucleotide"
cuuuugguuccaaguccaaua

SEQ ID NO: 3367 - RNA, 21 nt, Artificial Sequence
  source: /note="Description of Artificial Sequence: Synthetic oligonucleotide"
gccugugccaucaguaucuua

SEQ ID NO: 3368 - RNA, 21 nt, Artificial Sequence
  source: /note="Description of Artificial Sequence: Synthetic oligonucleotide"
gcuuaugaggugaucaaacua

SEQ ID NO: 3369 - RNA, 21 nt, Artificial Sequence
  source: /note="Description of Artificial Sequence: Synthetic oligonucleotide"
cuuaugaggugaucaaacuca

SEQ ID NO: 3370 - RNA, 21 nt, Artificial Sequence
  source: /note="Description of Artificial Sequence: Synthetic oligonucleotide"
ccuugcauuuugggacagaau

SEQ ID NO: 3371 - RNA, 21 nt, Artificial Sequence
  source: /note="Description of Artificial Sequence: Synthetic oligonucleotide"
gguuccaaguccaauauggca

SEQ ID NO: 3372 - RNA, 21 nt, Artificial Sequence
  source: /note="Description of Artificial Sequence: Synthetic oligonucleotide"
cacugucuaggcuacaacaga

SEQ ID NO: 3373 - RNA, 21 nt, Artificial Sequence
  source: /note="Description of Artificial Sequence: Synthetic oligonucleotide"
acugucuaggcuacaacagga

SEQ ID NO: 3374 - RNA, 21 nt, Artificial Sequence
  source: /note="Description of Artificial Sequence: Synthetic oligonucleotide"
aauaagauuacaguuguugga

SEQ ID NO: 3375 - RNA, 21 nt, Artificial Sequence
  source: /note="Description of Artificial Sequence: Synthetic oligonucleotide"
guugagagugcuuaugaggua

SEQ ID NO: 3376 - RNA, 21 nt, Artificial Sequence
  source: /note="Description of Artificial Sequence: Synthetic oligonucleotide"
gucuaggcuacaacaggauua

SEQ ID NO: 3377 - RNA, 21 nt, Artificial Sequence
  source: /note="Description of Artificial Sequence: Synthetic oligonucleotide"
ucuaggcuacaacaggauucu

SEQ ID NO: 3378 - RNA, 21 nt, Artificial Sequence
  source: /note="Description of Artificial Sequence: Synthetic oligonucleotide"
guggagguugugcauguugua

SEQ ID NO: 3379 - RNA, 21 nt, Artificial Sequence
  source: /note="Description of Artificial Sequence: Synthetic oligonucleotide"
ugaggugaucaaacucaaaga

SEQ ID NO: 3380 - RNA, 21 nt, Artificial Sequence
  source: /note="Description of Artificial Sequence: Synthetic oligonucleotide"
gugaucaaacucaaaggcuaa

SEQ ID NO: 3381 - RNA, 21 nt, Artificial Sequence
  source: /note="Description of Artificial Sequence: Synthetic oligonucleotide"
ugaggaagaggcccguuugaa

SEQ ID NO: 3382 - RNA, 21 nt, Artificial Sequence
  source: /note="Description of Artificial Sequence: Synthetic oligonucleotide"
acaagcaggugguugagagua

SEQ ID NO: 3383 - RNA, 21 nt, Artificial Sequence
  source: /note="Description of Artificial Sequence: Synthetic oligonucleotide"
cagauuuggcagagaguauaa

SEQ ID NO: 3384 - RNA, 21 nt, Artificial Sequence
  source: /note="Description of Artificial Sequence: Synthetic oligonucleotide"
gugcuuaugaggugaucaaac

SEQ ID NO: 3385 - RNA, 21 nt, Artificial Sequence
  source: /note="Description of Artificial Sequence: Synthetic oligonucleotide"
agcagauuuggcagagaguau

SEQ ID NO: 3386 - RNA, 21 nt, Artificial Sequence
  source: /note="Description of Artificial Sequence: Synthetic oligonucleotide"
auuuggcagagaguauaauga

SEQ ID NO: 3387 - RNA, 21 nt, Artificial Sequence
  source: /note="Description of Artificial Sequence: Synthetic oligonucleotide"
uuuggcagagaguauaaugaa

SEQ ID NO: 3388 - RNA, 21 nt, Artificial Sequence
  source: /note="Description of Artificial Sequence: Synthetic oligonucleotide"
cuugcauuuugggacagaaua

SEQ ID NO: 3389 - RNA, 21 nt, Artificial Sequence
  source: /note="Description of Artificial Sequence: Synthetic oligonucleotide"
auggaaucucagaccuuguga

SEQ ID NO: 3390 - RNA, 21 nt, Artificial Sequence
  source: /note="Description of Artificial Sequence: Synthetic oligonucleotide"
cacagcuauauccugaugcua

SEQ ID NO: 3391 - RNA, 21 nt, Artificial Sequence
  source: /note="Description of Artificial Sequence: Synthetic oligonucleotide"
gaggaagaggcccguuugaaa

SEQ ID NO: 3392 - RNA, 21 nt, Artificial Sequence
  source: /note="Description of Artificial Sequence: Synthetic oligonucleotide"
ucugaggaagaggcccguuua

SEQ ID NO: 3393 - RNA, 21 nt, Artificial Sequence
  source: /note="Description of Artificial Sequence: Synthetic oligonucleotide"
cacauccugggauccagugua

SEQ ID NO: 3394 - RNA, 21 nt, Artificial Sequence
  source: /note="Description of Artificial Sequence: Synthetic oligonucleotide"
agccuuuuccuuagaacacca

SEQ ID NO: 3395 - RNA, 21 nt, Artificial Sequence
  source: /note="Description of Artificial Sequence: Synthetic oligonucleotide"
ucaacugguuagugugaaaua

SEQ ID NO: 3396 - RNA, 23 nt, Artificial Sequence
  source: /note="Description of Artificial Sequence: Synthetic oligonucleotide"
uuuaaucacagaucagauaaaaa

SEQ ID NO: 3397 - RNA, 23 nt, Artificial Sequence
  source: /note="Description of Artificial Sequence: Synthetic oligonucleotide"
aacuauuucacacuaaccaguug

SEQ ID NO: 3398 - RNA, 23 nt, Artificial Sequence
  source: /note="Description of Artificial Sequence: Synthetic oligonucleotide"
aaauguuggacuaggcauguuca

SEQ ID NO: 3399 - RNA, 23 nt, Artificial Sequence
  source: /note="Description of Artificial Sequence: Synthetic oligonucleotide"
agaguugccauauuggacuugga

SEQ ID NO: 3400 - RNA, 23 nt, Artificial Sequence
  source: /note="Description of Artificial Sequence: Synthetic oligonucleotide"
aagacccuuaaucaugguggaaa

SEQ ID NO: 3401 - RNA, 23 nt, Artificial Sequence
  source: /note="Description of Artificial Sequence: Synthetic oligonucleotide"
uuagccuagacagugaaaugaua

SEQ ID NO: 3402 - RNA, 23 nt, Artificial Sequence
  source: /note="Description of Artificial Sequence: Synthetic oligonucleotide"
acagaucagauaaaaaggacaac

SEQ ID NO: 3403 - RNA, 23 nt, Artificial Sequence
  source: /note="Description of Artificial Sequence: Synthetic oligonucleotide"
uauauuggauuuauacacuggau

SEQ ID NO: 3404 - RNA, 23 nt, Artificial Sequence
  source: /note="Description of Artificial Sequence: Synthetic oligonucleotide"
uuaguugguauaacacuuggaua

SEQ ID NO: 3405 - RNA, 23 nt, Artificial Sequence
  source: /note="Description of Artificial Sequence: Synthetic oligonucleotide"
uuucaauuugucuucgaugacau

SEQ ID NO: 3406 - RNA, 23 nt, Artificial Sequence
  source: /note="Description of Artificial Sequence: Synthetic oligonucleotide"
uagagacaaucuuugguguucua

SEQ ID NO: 3407 - RNA, 23 nt, Artificial Sequence
  source: /note="Description of Artificial Sequence: Synthetic oligonucleotide"
ucagagacaaucuuugguguucu

SEQ ID NO: 3408 - RNA, 23 nt, Artificial Sequence
  source: /note="Description of Artificial Sequence: Synthetic oligonucleotide"
aucagauaaaaaggacaacaugc

SEQ ID NO: 3409 - RNA, 23 nt, Artificial Sequence
  source: /note="Description of Artificial Sequence: Synthetic oligonucleotide"
auuucuaacuucaggaguugaug

SEQ ID NO: 3410 - RNA, 23 nt, Artificial Sequence
  source: /note="Description of Artificial Sequence: Synthetic oligonucleotide"
ugguauaacacuuggauaguugg

SEQ ID NO: 3411 - RNA, 23 nt, Artificial Sequence
  source: /note="Description of Artificial Sequence: Synthetic oligonucleotide"
uaaucuuugguguucuaaggaaa

SEQ ID NO: 3412 - RNA, 23 nt, Artificial Sequence
  source: /note="Description of Artificial Sequence: Synthetic oligonucleotide"
agacuacacaagauuaauaccau

SEQ ID NO: 3413 - RNA, 23 nt, Artificial Sequence
  source: /note="Description of Artificial Sequence: Synthetic oligonucleotide"
ugcauguucagugaaggagccag

SEQ ID NO: 3414 - RNA, 23 nt, Artificial Sequence
  source: /note="Description of Artificial Sequence: Synthetic oligonucleotide"
ugguaauguacacuacugauaua

SEQ ID NO: 3415 - RNA, 23 nt, Artificial Sequence
  source: /note="Description of Artificial Sequence: Synthetic oligonucleotide"
uguguucuaaggaaaaggcugcc

SEQ ID NO: 3416 - RNA, 23 nt, Artificial Sequence
  source: /note="Description of Artificial Sequence: Synthetic oligonucleotide"
uaacuauuucacacuaaccaguu

SEQ ID NO: 3417 - RNA, 23 nt, Artificial Sequence
  source: /note="Description of Artificial Sequence: Synthetic oligonucleotide"
aauguacacuacugauauaguuc

SEQ ID NO: 3418 - RNA, 23 nt, Artificial Sequence
  source: /note="Description of Artificial Sequence: Synthetic oligonucleotide"
uuaauguacacuacugauauagu

SEQ ID NO: 3419 - RNA, 23 nt, Artificial Sequence
  source: /note="Description of Artificial Sequence: Synthetic oligonucleotide"
uaguccaucuuaaaauauuacug

SEQ ID NO: 3420 - RNA, 23 nt, Artificial Sequence
  source: /note="Description of Artificial Sequence: Synthetic oligonucleotide"
uuuucccaguccaucuuaaaaua

SEQ ID NO: 3421 - RNA, 23 nt, Artificial Sequence
  source: /note="Description of Artificial Sequence: Synthetic oligonucleotide"
agaacuauuucacacuaaccagu

SEQ ID NO: 3422 - RNA, 23 nt, Artificial Sequence
  source: /note="Description of Artificial Sequence: Synthetic oligonucleotide"
ugacuaggcauguucagugaagg

SEQ ID NO: 3423 - RNA, 23 nt, Artificial Sequence
  source: /note="Description of Artificial Sequence: Synthetic oligonucleotide"
uauaacacuuggauaguugguug

SEQ ID NO: 3424 - RNA, 23 nt, Artificial Sequence
  source: /note="Description of Artificial Sequence: Synthetic oligonucleotide"
uuuaguugguauaacacuuggau

SEQ ID NO: 3425 - RNA, 23 nt, Artificial Sequence
  source: /note="Description of Artificial Sequence: Synthetic oligonucleotide"
uggacuuggaaccaaaaggaauc

SEQ ID NO: 3426 - RNA, 23 nt, Artificial Sequence
  source: /note="Description of Artificial Sequence: Synthetic oligonucleotide"
uuguucuaaggaaaaggcugcca

SEQ ID NO: 3427 - RNA, 23 nt, Artificial Sequence
  source: /note="Description of Artificial Sequence: Synthetic oligonucleotide"
aguccaucuuaaaauauuacugc

SEQ ID NO: 3428 - RNA, 23 nt, Artificial Sequence
  source: /note="Description of Artificial Sequence: Synthetic oligonucleotide"
uaggauauagcuguggauuuuac

SEQ ID NO: 3429 - RNA, 23 nt, Artificial Sequence
  source: /note="Description of Artificial Sequence: Synthetic oligonucleotide"
uuaggcauguucagugaaggagc

SEQ ID NO: 3430 - RNA, 23 nt, Artificial Sequence
  source: /note="Description of Artificial Sequence: Synthetic oligonucleotide"
uuggacuaggcauguucagugaa

SEQ ID NO: 3431 - RNA, 23 nt, Artificial Sequence
  source: /note="Description of Artificial Sequence: Synthetic oligonucleotide"
guuuuaguugguauaacacuugg

SEQ ID NO: 3432 - RNA, 23 nt, Artificial Sequence
  source: /note="Description of Artificial Sequence: Synthetic oligonucleotide"
agacccuuaaucaugguggaaac

SEQ ID NO: 3433 - RNA, 23 nt, Artificial Sequence
  source: /note="Description of Artificial Sequence: Synthetic oligonucleotide"
aauguuggacuaggcauguucag

SEQ ID NO: 3434 - RNA, 23 nt, Artificial Sequence
  source: /note="Description of Artificial Sequence: Synthetic oligonucleotide"
augguaauguacacuacugauau

SEQ ID NO: 3435 - RNA, 23 nt, Artificial Sequence
  source: /note="Description of Artificial Sequence: Synthetic oligonucleotide"
uaguugguauaacacuuggauag

SEQ ID NO: 3436 - RNA, 23 nt, Artificial Sequence
  source: /note="Description of Artificial Sequence: Synthetic oligonucleotide"
uaguugccauauuggacuuggaa

SEQ ID NO: 3437 - RNA, 23 nt, Artificial Sequence
  source: /note="Description of Artificial Sequence: Synthetic oligonucleotide"
uaccuucacaaggucugagauuc

SEQ ID NO: 3438 - RNA, 23 nt, Artificial Sequence
  source: /note="Description of Artificial Sequence: Synthetic oligonucleotide"
uguagccuagacagugaaaugau

SEQ ID NO: 3439 - RNA, 23 nt, Artificial Sequence
  source: /note="Description of Artificial Sequence: Synthetic oligonucleotide"
agcaucaggauauagcuguggau

SEQ ID NO: 3440 - RNA, 23 nt, Artificial Sequence
  source: /note="Description of Artificial Sequence: Synthetic oligonucleotide"
uacuaggcauguucagugaagga

SEQ ID NO: 3441 - RNA, 23 nt, Artificial Sequence
  source: /note="Description of Artificial Sequence: Synthetic oligonucleotide"
uucauaagcacucucaaccaccu

SEQ ID NO: 3442 - RNA, 23 nt, Artificial Sequence
  source: /note="Description of Artificial Sequence: Synthetic oligonucleotide"
uauguguagccuuugaguuugau

SEQ ID NO: 3443 - RNA, 23 nt, Artificial Sequence
  source: /note="Description of Artificial Sequence: Synthetic oligonucleotide"
uguaauguacacuacugauauag

SEQ ID NO: 3444 - RNA, 23 nt, Artificial Sequence
  source: /note="Description of Artificial Sequence: Synthetic oligonucleotide"
uaacacuuggauaguugguugca

SEQ ID NO: 3445 - RNA, 23 nt, Artificial Sequence
  source: /note="Description of Artificial Sequence: Synthetic oligonucleotide"
ucuucaauuugucuucgaugaca

SEQ ID NO: 3446 - RNA, 23 nt, Artificial Sequence
  source: /note="Description of Artificial Sequence: Synthetic oligonucleotide"
uauacucucugccaaaucugcua

SEQ ID NO: 3447 - RNA, 23 nt, Artificial Sequence
  source: /note="Description of Artificial Sequence: Synthetic oligonucleotide"
uaggcauguucagugaaggagcc

SEQ ID NO: 3448 - RNA, 23 nt, Artificial Sequence
  source: /note="Description of Artificial Sequence: Synthetic oligonucleotide"
aaaaauguuggacuaggcauguu

SEQ ID NO: 3449 - RNA, 23 nt, Artificial Sequence
  source: /note="Description of Artificial Sequence: Synthetic oligonucleotide"
uucauuaagauacugauggcaca

SEQ ID NO: 3450 - RNA, 23 nt, Artificial Sequence
  source: /note="Description of Artificial Sequence: Synthetic oligonucleotide"
uuucauuaagauacugauggcac

SEQ ID NO: 3451 - RNA, 23 nt, Artificial Sequence
  source: /note="Description of Artificial Sequence: Synthetic oligonucleotide"
agacaaucuuugguguucuaagg

SEQ ID NO: 3452 - RNA, 23 nt, Artificial Sequence
  source: /note="Description of Artificial Sequence: Synthetic oligonucleotide"
uagccuagacagugaaaugauau

SEQ ID NO: 3453 - RNA, 23 nt, Artificial Sequence
  source: /note="Description of Artificial Sequence: Synthetic oligonucleotide"
uuguuguagccuagacagugaaa

SEQ ID NO: 3454 - RNA, 23 nt, Artificial Sequence
  source: /note="Description of Artificial Sequence: Synthetic oligonucleotide"
uuggauuuauacacuggauccca

SEQ ID NO: 3455 - RNA, 23 nt, Artificial Sequence
  source: /note="Description of Artificial Sequence: Synthetic oligonucleotide"
uguauaacacuuggauaguuggu

SEQ ID NO: 3456 - RNA, 23 nt, Artificial Sequence
  source: /note="Description of Artificial Sequence: Synthetic oligonucleotide"
ucauauuggacuuggaaccaaaa

SEQ ID NO: 3457 - RNA, 23 nt, Artificial Sequence
  source: /note="Description of Artificial Sequence: Synthetic oligonucleotide"
aguuugaucaccucauaagcacu

SEQ ID NO: 3458 - RNA, 23 nt, Artificial Sequence
  source: /note="Description of Artificial Sequence: Synthetic oligonucleotide"
ugauguguagccuuugaguuuga

SEQ ID NO: 3459 - RNA, 23 nt, Artificial Sequence
  source: /note="Description of Artificial Sequence: Synthetic oligonucleotide"
ucaccuucacaaggucugagauu

SEQ ID NO: 3460 - RNA, 23 nt, Artificial Sequence
  source: /note="Description of Artificial Sequence: Synthetic oligonucleotide"
aggauauagcuguggauuuuaca

SEQ ID NO: 3461 - RNA, 23 nt, Artificial Sequence
  source: /note="Description of Artificial Sequence: Synthetic oligonucleotide"
acuaggcauguucagugaaggag

SEQ ID NO: 3462 - RNA, 23 nt, Artificial Sequence
  source: /note="Description of Artificial Sequence: Synthetic oligonucleotide"
uggauuuauacacuggaucccag

SEQ ID NO: 3463 - RNA, 23 nt, Artificial Sequence
  source: /note="Description of Artificial Sequence: Synthetic oligonucleotide"
uucacuguucaagguuuauuggg

SEQ ID NO: 3464 - RNA, 23 nt, Artificial Sequence
  source: /note="Description of Artificial Sequence: Synthetic oligonucleotide"
aagauacugauggcacaggccau

SEQ ID NO: 3465 - RNA, 23 nt, Artificial Sequence
  source: /note="Description of Artificial Sequence: Synthetic oligonucleotide"
ugucuucgaugacaucaacaaga

SEQ ID NO: 3466 - RNA, 23 nt, Artificial Sequence
  source: /note="Description of Artificial Sequence: Synthetic oligonucleotide"
auaguucacaaaauaagauccuu

SEQ ID NO: 3467 - RNA, 23 nt, Artificial Sequence
  source: /note="Description of Artificial Sequence: Synthetic oligonucleotide"
aguucacaaaauaagauccuuug

SEQ ID NO: 3468 - RNA, 23 nt, Artificial Sequence
  source: /note="Description of Artificial Sequence: Synthetic oligonucleotide"
uaauuaugcacaagacaugauau

SEQ ID NO: 3469 - RNA, 23 nt, Artificial Sequence
  source: /note="Description of Artificial Sequence: Synthetic oligonucleotide"
agacagugaaaugauaugacauc

SEQ ID NO: 3470 - RNA, 23 nt, Artificial Sequence
  source: /note="Description of Artificial Sequence: Synthetic oligonucleotide"
uuagacagugaaaugauaugaca

SEQ ID NO: 3471 - RNA, 23 nt, Artificial Sequence
  source: /note="Description of Artificial Sequence: Synthetic oligonucleotide"
uuccuuuagaagauuauaaauca

SEQ ID NO: 3472 - RNA, 23 nt, Artificial Sequence
  source: /note="Description of Artificial Sequence: Synthetic oligonucleotide"
agcuguggauuuuacaaaccauu

SEQ ID NO: 3473 - RNA, 23 nt, Artificial Sequence
  source: /note="Description of Artificial Sequence: Synthetic oligonucleotide"
aagauuaauaccauccagcauca

SEQ ID NO: 3474 - RNA, 23 nt, Artificial Sequence
  source: /note="Description of Artificial Sequence: Synthetic oligonucleotide"
auguacacuacugauauaguuca

SEQ ID NO: 3475 - RNA, 23 nt, Artificial Sequence
  source: /note="Description of Artificial Sequence: Synthetic oligonucleotide"
uuucuaacuucaggaguugaugu

SEQ ID NO: 3476 - RNA, 23 nt, Artificial Sequence
  source: /note="Description of Artificial Sequence: Synthetic oligonucleotide"
uacaagauuaauaccauccagca

SEQ ID NO: 3477 - RNA, 23 nt, Artificial Sequence
  source: /note="Description of Artificial Sequence: Synthetic oligonucleotide"
agccuagacagugaaaugauaug

SEQ ID NO: 3478 - RNA, 23 nt, Artificial Sequence
  source: /note="Description of Artificial Sequence: Synthetic oligonucleotide"
ugauauagcuguggauuuuacaa

SEQ ID NO: 3479 - RNA, 23 nt, Artificial Sequence
  source: /note="Description of Artificial Sequence: Synthetic oligonucleotide"
aaaugcaaggaacacuaaggaag

SEQ ID NO: 3480 - RNA, 23 nt, Artificial Sequence
  source: /note="Description of Artificial Sequence: Synthetic oligonucleotide"
ucuagacagugaaaugauaugac

SEQ ID NO: 3481 - RNA, 23 nt, Artificial Sequence
  source: /note="Description of Artificial Sequence: Synthetic oligonucleotide"
uuaacuucaggaguugauguuuu

SEQ ID NO: 3482 - RNA, 23 nt, Artificial Sequence
  source: /note="Description of Artificial Sequence: Synthetic oligonucleotide"
uuaauaccauccagcaucaggau

SEQ ID NO: 3483 - RNA, 23 nt, Artificial Sequence
  source: /note="Description of Artificial Sequence: Synthetic oligonucleotide"
acuuggauaguugguugcauugu

SEQ ID NO: 3484 - RNA, 23 nt, Artificial Sequence
  source: /note="Description of Artificial Sequence: Synthetic oligonucleotide"
uaucauccuuuauuccguaaaga

SEQ ID NO: 3485 - RNA, 23 nt, Artificial Sequence
  source: /note="Description of Artificial Sequence: Synthetic oligonucleotide"
aaugcaaggaacacuaaggaaga

SEQ ID NO: 3486 - RNA, 23 nt, Artificial Sequence
  source: /note="Description of Artificial Sequence: Synthetic oligonucleotide"
uuuggauaguugguugcauuguu

SEQ ID NO: 3487 - RNA, 23 nt, Artificial Sequence
  source: /note="Description of Artificial Sequence: Synthetic oligonucleotide"
auuauacucucugccaaaucugc

SEQ ID NO: 3488 - RNA, 23 nt, Artificial Sequence
  source: /note="Description of Artificial Sequence: Synthetic oligonucleotide"
uacccuuaaucaugguggaaacu

SEQ ID NO: 3489 - RNA, 23 nt, Artificial Sequence
  source: /note="Description of Artificial Sequence: Synthetic oligonucleotide"
aacuauuucacacuaaccaguug

SEQ ID NO: 3490 - RNA, 23 nt, Artificial Sequence
  source: /note="Description of Artificial Sequence: Synthetic oligonucleotide"
agaguugccauauuggacuugga

SEQ ID NO: 3491 - RNA, 23 nt, Artificial Sequence
  source: /note="Description of Artificial Sequence: Synthetic oligonucleotide"
aagacccuuaaucaugguggaaa

SEQ ID NO: 3492 - RNA, 23 nt, Artificial Sequence
  source: /note="Description of Artificial Sequence: Synthetic oligonucleotide"
uuagccuagacagugaaaugaua

SEQ ID NO: 3493 - RNA, 23 nt, Artificial Sequence
  source: /note="Description of Artificial Sequence: Synthetic oligonucleotide"
acagaucagauaaaaaggacaac

SEQ ID NO: 3494 - RNA, 23 nt, Artificial Sequence
  source: /note="Description of Artificial Sequence: Synthetic oligonucleotide"
uauauuggauuuauacacuggau

SEQ ID NO: 3495 - RNA, 23 nt, Artificial Sequence
  source: /note="Description of Artificial Sequence: Synthetic oligonucleotide"
uuaguugguauaacacuuggaua

SEQ ID NO: 3496 - RNA, 23 nt, Artificial Sequence
  source: /note="Description of Artificial Sequence: Synthetic oligonucleotide"
uagagacaaucuuugguguucua

SEQ ID NO: 3497 - RNA, 23 nt, Artificial Sequence
  source: /note="Description of Artificial Sequence: Synthetic oligonucleotide"
ucagagacaaucuuugguguucu

SEQ ID NO: 3498 - RNA, 23 nt, Artificial Sequence
  source: /note="Description of Artificial Sequence: Synthetic oligonucleotide"
aucagauaaaaaggacaacaugc

SEQ ID NO: 3499 - RNA, 23 nt, Artificial Sequence
  source: /note="Description of Artificial Sequence: Synthetic oligonucleotide"
auuucuaacuucaggaguugaug

SEQ ID NO: 3500 - RNA, 23 nt, Artificial Sequence
  source: /note="Description of Artificial Sequence: Synthetic oligonucleotide"
ugguauaacacuuggauaguugg

SEQ ID NO: 3501 - RNA, 23 nt, Artificial Sequence
  source: /note="Description of Artificial Sequence: Synthetic oligonucleotide"
agacuacacaagauuaauaccau

SEQ ID NO: 3502 - RNA, 23 nt, Artificial Sequence
  source: /note="Description of Artificial Sequence: Synthetic oligonucleotide"
ugcauguucagugaaggagccag

SEQ ID NO: 3503 - RNA, 23 nt, Artificial Sequence
  source: /note="Description of Artificial Sequence: Synthetic oligonucleotide"
ugguaauguacacuacugauaua

SEQ ID NO: 3504 - RNA, 23 nt, Artificial Sequence
  source: /note="Description of Artificial Sequence: Synthetic oligonucleotide"
uguguucuaaggaaaaggcugcc

SEQ ID NO: 3505 - RNA, 23 nt, Artificial Sequence
  source: /note="Description of Artificial Sequence: Synthetic oligonucleotide"
uaacuauuucacacuaaccaguu

SEQ ID NO: 3506 - RNA, 23 nt, Artificial Sequence
  source: /note="Description of Artificial Sequence: Synthetic oligonucleotide"
aauguacacuacugauauaguuc

SEQ ID NO: 3507 - RNA, 23 nt, Artificial Sequence
  source: /note="Description of Artificial Sequence: Synthetic oligonucleotide"
uuaauguacacuacugauauagu

SEQ ID NO: 3508 - RNA, 23 nt, Artificial Sequence
  source: /note="Description of Artificial Sequence: Synthetic oligonucleotide"
uaguccaucuuaaaauauuacug

SEQ ID NO: 3509 - RNA, 23 nt, Artificial Sequence
  source: /note="Description of Artificial Sequence: Synthetic oligonucleotide"
uuuucccaguccaucuuaaaaua

SEQ ID NO: 3510 - RNA, 23 nt, Artificial Sequence
  source: /note="Description of Artificial Sequence: Synthetic oligonucleotide"
ugacuaggcauguucagugaagg

SEQ ID NO: 3511 - RNA, 23 nt, Artificial Sequence
  source: /note="Description of Artificial Sequence: Synthetic oligonucleotide"
uauaacacuuggauaguugguug

SEQ ID NO: 3512 - RNA, 23 nt, Artificial Sequence
  source: /note="Description of Artificial Sequence: Synthetic oligonucleotide"
uuuaguugguauaacacuuggau

SEQ ID NO: 3513 - RNA, 23 nt, Artificial Sequence
  source: /note="Description of Artificial Sequence: Synthetic oligonucleotide"
aguccaucuuaaaauauuacugc

SEQ ID NO: 3514 - RNA, 23 nt, Artificial Sequence
  source: /note="Description of Artificial Sequence: Synthetic oligonucleotide"
uaggauauagcuguggauuuuac

SEQ ID NO: 3515 - RNA, 23 nt, Artificial Sequence
  source: /note="Description of Artificial Sequence: Synthetic oligonucleotide"
uuaggcauguucagugaaggagc

SEQ ID NO: 3516 - RNA, 23 nt, Artificial Sequence
  source: /note="Description of Artificial Sequence: Synthetic oligonucleotide"
uuggacuaggcauguucagugaa

SEQ ID NO: 3517 - RNA, 23 nt, Artificial Sequence
  source: /note="Description of Artificial Sequence: Synthetic oligonucleotide"
guuuuaguugguauaacacuugg

SEQ ID NO: 3518 - RNA, 23 nt, Artificial Sequence
  source: /note="Description of Artificial Sequence: Synthetic oligonucleotide"
agacccuuaaucaugguggaaac

SEQ ID NO: 3519 - RNA, 23 nt, Artificial Sequence
  source: /note="Description of Artificial Sequence: Synthetic oligonucleotide"
aauguuggacuaggcauguucag

SEQ ID NO: 3520 - RNA, 23 nt, Artificial Sequence
  source: /note="Description of Artificial Sequence: Synthetic oligonucleotide"
augguaauguacacuacugauau

SEQ ID NO: 3521 - RNA, 23 nt, Artificial Sequence
  source: /note="Description of Artificial Sequence: Synthetic oligonucleotide"
uaguugguauaacacuuggauag

SEQ ID NO: 3522 - RNA, 23 nt, Artificial Sequence
  source: /note="Description of Artificial Sequence: Synthetic oligonucleotide"
uaguugccauauuggacuuggaa

SEQ ID NO: 3523 - RNA, 23 nt, Artificial Sequence
  source: /note="Description of Artificial Sequence: Synthetic oligonucleotide"
uguagccuagacagugaaaugau

SEQ ID NO: 3524 - RNA, 23 nt, Artificial Sequence
  source: /note="Description of Artificial Sequence: Synthetic oligonucleotide"
agcaucaggauauagcuguggau

SEQ ID NO: 3525 - RNA, 23 nt, Artificial Sequence
  source: /note="Description of Artificial Sequence: Synthetic oligonucleotide"
uacuaggcauguucagugaagga

SEQ ID NO: 3526 - RNA, 23 nt, Artificial Sequence
  source: /note="Description of Artificial Sequence: Synthetic oligonucleotide"
uucauaagcacucucaaccaccu

SEQ ID NO: 3527 - RNA, 23 nt, Artificial Sequence
  source: /note="Description of Artificial Sequence: Synthetic oligonucleotide"
uguaauguacacuacugauauag

SEQ ID NO: 3528 - RNA, 23 nt, Artificial Sequence
  source: /note="Description of Artificial Sequence: Synthetic oligonucleotide"
uaacacuuggauaguugguugca

SEQ ID NO: 3529 - RNA, 23 nt, Artificial Sequence
  source: /note="Description of Artificial Sequence: Synthetic oligonucleotide"
uauacucucugccaaaucugcua

SEQ ID NO: 3530 - RNA, 23 nt, Artificial Sequence
  source: /note="Description of Artificial Sequence: Synthetic oligonucleotide"
uaggcauguucagugaaggagcc

SEQ ID NO: 3531 - RNA, 23 nt, Artificial Sequence
  source: /note="Description of Artificial Sequence: Synthetic oligonucleotide"
aaaaauguuggacuaggcauguu

SEQ ID NO: 3532 - RNA, 23 nt, Artificial Sequence
  source: /note="Description of Artificial Sequence: Synthetic oligonucleotide"
uucauuaagauacugauggcaca

SEQ ID NO: 3533 - RNA, 23 nt, Artificial Sequence
  source: /note="Description of Artificial Sequence: Synthetic oligonucleotide"
uuucauuaagauacugauggcac

SEQ ID NO: 3534 - RNA, 23 nt, Artificial Sequence
  source: /note="Description of Artificial Sequence: Synthetic oligonucleotide"
agacaaucuuugguguucuaagg

SEQ ID NO: 3535 - RNA, 23 nt, Artificial Sequence
  source: /note="Description of Artificial Sequence: Synthetic oligonucleotide"
uagccuagacagugaaaugauau

SEQ ID NO: 3536 - RNA, 23 nt, Artificial Sequence
  source: /note="Description of Artificial Sequence: Synthetic oligonucleotide"
uuguuguagccuagacagugaaa

SEQ ID NO: 3537 - RNA, 23 nt, Artificial Sequence
  source: /note="Description of Artificial Sequence: Synthetic oligonucleotide"
uguauaacacuuggauaguuggu

SEQ ID NO: 3538 - RNA, 23 nt, Artificial Sequence
  source: /note="Description of Artificial Sequence: Synthetic oligonucleotide"
ucauauuggacuuggaaccaaaa

SEQ ID NO: 3539 - RNA, 23 nt, Artificial Sequence
  source: /note="Description of Artificial Sequence: Synthetic oligonucleotide"
aguuugaucaccucauaagcacu

SEQ ID NO: 3540 - RNA, 23 nt, Artificial Sequence
  source: /note="Description of Artificial Sequence: Synthetic oligonucleotide"
ucaccuucacaaggucugagauu

SEQ ID NO: 3541 - RNA, 23 nt, Artificial Sequence
  source: /note="Description of Artificial Sequence: Synthetic oligonucleotide"
aggauauagcuguggauuuuaca

SEQ ID NO: 3542 - RNA, 23 nt, Artificial Sequence
  source: /note="Description of Artificial Sequence: Synthetic oligonucleotide"
acuaggcauguucagugaaggag

SEQ ID NO: 3543 - RNA, 23 nt, Artificial Sequence
  source: /note="Description of Artificial Sequence: Synthetic oligonucleotide"
uggauuuauacacuggaucccag

SEQ ID NO: 3544 - RNA, 23 nt, Artificial Sequence
  source: /note="Description of Artificial Sequence: Synthetic oligonucleotide"
uucacuguucaagguuuauuggg

SEQ ID NO: 3545 - RNA, 23 nt, Artificial Sequence
  source: /note="Description of Artificial Sequence: Synthetic oligonucleotide"
aagauacugauggcacaggccau

SEQ ID NO: 3546 - RNA, 23 nt, Artificial Sequence
  source: /note="Description of Artificial Sequence: Synthetic oligonucleotide"
ugucuucgaugacaucaacaaga

SEQ ID NO: 3547 - RNA, 23 nt, Artificial Sequence
  source: /note="Description of Artificial Sequence: Synthetic oligonucleotide"
auuauacucucugccaaaucugc

SEQ ID NO: 3548 - RNA, 23 nt, Artificial Sequence
  source: /note="Description of Artificial Sequence: Synthetic oligonucleotide"
uacccuuaaucaugguggaaacu

SEQ ID NO: 3549 - RNA, 23 nt, Artificial Sequence
  source: /note="Description of Artificial Sequence: Synthetic oligonucleotide"
uagaauccuguuguagccuagac

SEQ ID NO: 3550 - RNA, 23 nt, Artificial Sequence
  source: /note="Description of Artificial Sequence: Synthetic oligonucleotide"
ugacaacaugcacaaccuccacc

SEQ ID NO: 3551 - RNA, 23 nt, Artificial Sequence
  source: /note="Description of Artificial Sequence: Synthetic oligonucleotide"
aggcauguucagugaaggagcca

SEQ ID NO: 3552 - RNA, 23 nt, Artificial Sequence
  source: /note="Description of Artificial Sequence: Synthetic oligonucleotide"
uauuggacuuggaaccaaaagga

SEQ ID NO: 3553 - RNA, 23 nt, Artificial Sequence
  source: /note="Description of Artificial Sequence: Synthetic oligonucleotide"
uaagauacugauggcacaggcca

SEQ ID NO: 3554 - RNA, 23 nt, Artificial Sequence
  source: /note="Description of Artificial Sequence: Synthetic oligonucleotide"
uaguuugaucaccucauaagcac

SEQ ID NO: 3555 - RNA, 23 nt, Artificial Sequence
  source: /note="Description of Artificial Sequence: Synthetic oligonucleotide"
ugaguuugaucaccucauaagca

SEQ ID NO: 3556 - RNA, 23 nt, Artificial Sequence
  source: /note="Description of Artificial Sequence: Synthetic oligonucleotide"
auucugucccaaaaugcaaggaa

SEQ ID NO: 3557 - RNA, 23 nt, Artificial Sequence
  source: /note="Description of Artificial Sequence: Synthetic oligonucleotide"
ugccauauuggacuuggaaccaa

SEQ ID NO: 3558 - RNA, 23 nt, Artificial Sequence
  source: /note="Description of Artificial Sequence: Synthetic oligonucleotide"
ucuguuguagccuagacagugaa

SEQ ID NO: 3559 - RNA, 23 nt, Artificial Sequence
  source: /note="Description of Artificial Sequence: Synthetic oligonucleotide"
uccuguuguagccuagacaguga

SEQ ID NO: 3560 - RNA, 23 nt, Artificial Sequence
  source: /note="Description of Artificial Sequence: Synthetic oligonucleotide"
uccaacaacuguaaucuuauucu

SEQ ID NO: 3561 - RNA, 23 nt, Artificial Sequence
  source: /note="Description of Artificial Sequence: Synthetic oligonucleotide"
uaccucauaagcacucucaacca

SEQ ID NO: 3562 - RNA, 23 nt, Artificial Sequence
  source: /note="Description of Artificial Sequence: Synthetic oligonucleotide"
uaauccuguuguagccuagacag

SEQ ID NO: 3563 - RNA, 23 nt, Artificial Sequence
  source: /note="Description of Artificial Sequence: Synthetic oligonucleotide"
agaauccuguuguagccuagaca

SEQ ID NO: 3564 - RNA, 23 nt, Artificial Sequence
  source: /note="Description of Artificial Sequence: Synthetic oligonucleotide"
uacaacaugcacaaccuccaccu

SEQ ID NO: 3565 - RNA, 23 nt, Artificial Sequence
  source: /note="Description of Artificial Sequence: Synthetic oligonucleotide"
ucuuugaguuugaucaccucaua

SEQ ID NO: 3566 - RNA, 23 nt, Artificial Sequence
  source: /note="Description of Artificial Sequence: Synthetic oligonucleotide"
uuagccuuugaguuugaucaccu

SEQ ID NO: 3567 - RNA, 23 nt, Artificial Sequence
  source: /note="Description of Artificial Sequence: Synthetic oligonucleotide"
uucaaacgggccucuuccucaga

SEQ ID NO: 3568 - RNA, 23 nt, Artificial Sequence
  source: /note="Description of Artificial Sequence: Synthetic oligonucleotide"
uacucucaaccaccugcuuguga

SEQ ID NO: 3569 - RNA, 23 nt, Artificial Sequence
  source: /note="Description of Artificial Sequence: Synthetic oligonucleotide"
uuauacucucugccaaaucugcu

SEQ ID NO: 3570 - RNA, 23 nt, Artificial Sequence
  source: /note="Description of Artificial Sequence: Synthetic oligonucleotide"
guuugaucaccucauaagcacuc

SEQ ID NO: 3571 - RNA, 23 nt, Artificial Sequence
  source: /note="Description of Artificial Sequence: Synthetic oligonucleotide"
auacucucugccaaaucugcuac

SEQ ID NO: 3572 - RNA, 23 nt, Artificial Sequence
  source: /note="Description of Artificial Sequence: Synthetic oligonucleotide"
ucauuauacucucugccaaaucu

SEQ ID NO: 3573 - RNA, 23 nt, Artificial Sequence
  source: /note="Description of Artificial Sequence: Synthetic oligonucleotide"
uucauuauacucucugccaaauc

SEQ ID NO: 3574 - RNA, 23 nt, Artificial Sequence
  source: /note="Description of Artificial Sequence: Synthetic oligonucleotide"
uauucugucccaaaaugcaagga

SEQ ID NO: 3575 - RNA, 23 nt, Artificial Sequence
  source: /note="Description of Artificial Sequence: Synthetic oligonucleotide"
ucacaaggucugagauuccauuc

SEQ ID NO: 3576 - RNA, 23 nt, Artificial Sequence
  source: /note="Description of Artificial Sequence: Synthetic oligonucleotide"
uagcaucaggauauagcugugga

SEQ ID NO: 3577 - RNA, 23 nt, Artificial Sequence
  source: /note="Description of Artificial Sequence: Synthetic oligonucleotide"
uuucaaacgggccucuuccucag

SEQ ID NO: 3578 - RNA, 23 nt, Artificial Sequence
  source: /note="Description of Artificial Sequence: Synthetic oligonucleotide"
uaaacgggccucuuccucagaag

SEQ ID NO: 3579 - RNA, 23 nt, Artificial Sequence
  source: /note="Description of Artificial Sequence: Synthetic oligonucleotide"
uacacuggaucccaggaugugac

SEQ ID NO: 3580 - RNA, 23 nt, Artificial Sequence
  source: /note="Description of Artificial Sequence: Synthetic oligonucleotide"
ugguguucuaaggaaaaggcugc

SEQ ID NO: 3581 - RNA, 23 nt, Artificial Sequence
  source: /note="Description of Artificial Sequence: Synthetic oligonucleotide"
uauuucacacuaaccaguugaag

SEQ ID NO: 3582 - RNA, 21 nt, Artificial Sequence
  source: /note="Description of Artificial Sequence: Synthetic oligonucleotide"
uuuaucugaucugugauuaaa

SEQ ID NO: 3583 - RNA, 21 nt, Artificial Sequence
  source: /note="Description of Artificial Sequence: Synthetic oligonucleotide"
acugguuagugugaaauaguu

SEQ ID NO: 3584 - RNA, 21 nt, Artificial Sequence
  source: /note="Description of Artificial Sequence: Synthetic oligonucleotide"
aacaugccuaguccaacauuu

SEQ ID NO: 3585 - RNA, 21 nt, Artificial Sequence
  source: /note="Description of Artificial Sequence: Synthetic oligonucleotide"
caaguccaauauggcaacucu

SEQ ID NO: 3586 - RNA, 21 nt, Artificial Sequence
  source: /note="Description of Artificial Sequence: Synthetic oligonucleotide"
uccaccaugauuaagggucuu

SEQ ID NO: 3587 - RNA, 21 nt, Artificial Sequence
  source: /note="Description of Artificial Sequence: Synthetic oligonucleotide"
ucauuucacugucuaggcuaa

SEQ ID NO: 3588 - RNA, 21 nt, Artificial Sequence
  source: /note="Description of Artificial Sequence: Synthetic oligonucleotide"
uguccuuuuuaucugaucugu

SEQ ID NO: 3589 - RNA, 21 nt, Artificial Sequence
  source: /note="Description of Artificial Sequence: Synthetic oligonucleotide"
ccaguguauaaauccaauaua

SEQ ID NO: 3590 - RNA, 21 nt, Artificial Sequence
  source: /note="Description of Artificial Sequence: Synthetic oligonucleotide"
uccaaguguuauaccaacuaa

SEQ ID NO: 3591 - RNA, 21 nt, Artificial Sequence
  source: /note="Description of Artificial Sequence: Synthetic oligonucleotide"
gucaucgaagacaaauugaaa

SEQ ID NO: 3592 - RNA, 21 nt, Artificial Sequence
  source: /note="Description of Artificial Sequence: Synthetic oligonucleotide"
gaacaccaaagauugucucua

SEQ ID NO: 3593 - RNA, 21 nt, Artificial Sequence
  source: /note="Description of Artificial Sequence: Synthetic oligonucleotide"
aacaccaaagauugucucuga

SEQ ID NO: 3594 - RNA, 21 nt, Artificial Sequence
  source: /note="Description of Artificial Sequence: Synthetic oligonucleotide"
auguuguccuuuuuaucugau

SEQ ID NO: 3595 - RNA, 21 nt, Artificial Sequence
  source: /note="Description of Artificial Sequence: Synthetic oligonucleotide"
ucaacuccugaaguuagaaau

SEQ ID NO: 3596 - RNA, 21 nt, Artificial Sequence
  source: /note="Description of Artificial Sequence: Synthetic oligonucleotide"
aacuauccaaguguuauacca

SEQ ID NO: 3597 - RNA, 21 nt, Artificial Sequence
  source: /note="Description of Artificial Sequence: Synthetic oligonucleotide"
uccuuagaacaccaaagauua

SEQ ID NO: 3598 - RNA, 21 nt, Artificial Sequence
  source: /note="Description of Artificial Sequence: Synthetic oligonucleotide"
gguauuaaucuuguguagucu

SEQ ID NO: 3599 - RNA, 21 nt, Artificial Sequence
  source: /note="Description of Artificial Sequence: Synthetic oligonucleotide"
ggcuccuucacugaacaugca

SEQ ID NO: 3600 - RNA, 21 nt, Artificial Sequence
  source: /note="Description of Artificial Sequence: Synthetic oligonucleotide"
uaucaguaguguacauuacca

SEQ ID NO: 3601 - RNA, 21 nt, Artificial Sequence
  source: /note="Description of Artificial Sequence: Synthetic oligonucleotide"
cagccuuuuccuuagaacaca

SEQ ID NO: 3602 - RNA, 21 nt, Artificial Sequence
  source: /note="Description of Artificial Sequence: Synthetic oligonucleotide"
cugguuagugugaaauaguua

SEQ ID NO: 3603 - RNA, 21 nt, Artificial Sequence
  source: /note="Description of Artificial Sequence: Synthetic oligonucleotide"
acuauaucaguaguguacauu

SEQ ID NO: 3604 - RNA, 21 nt, Artificial Sequence
  source: /note="Description of Artificial Sequence: Synthetic oligonucleotide"
uauaucaguaguguacauuaa

SEQ ID NO: 3605 - RNA, 21 nt, Artificial Sequence
  source: /note="Description of Artificial Sequence: Synthetic oligonucleotide"
guaauauuuuaagauggacua

SEQ ID NO: 3606 - RNA, 21 nt, Artificial Sequence
  source: /note="Description of Artificial Sequence: Synthetic oligonucleotide"
uuuuaagauggacugggaaaa

SEQ ID NO: 3607 - RNA, 21 nt, Artificial Sequence
  source: /note="Description of Artificial Sequence: Synthetic oligonucleotide"
ugguuagugugaaauaguucu

SEQ ID NO: 3608 - RNA, 21 nt, Artificial Sequence
  source: /note="Description of Artificial Sequence: Synthetic oligonucleotide"
uucacugaacaugccuaguca

SEQ ID NO: 3609 - RNA, 21 nt, Artificial Sequence
  source: /note="Description of Artificial Sequence: Synthetic oligonucleotide"
accaacuauccaaguguuaua

SEQ ID NO: 3610 - RNA, 21 nt, Artificial Sequence
  source: /note="Description of Artificial Sequence: Synthetic oligonucleotide"
ccaaguguuauaccaacuaaa

SEQ ID NO: 3611 - RNA, 21 nt, Artificial Sequence
  source: /note="Description of Artificial Sequence: Synthetic oligonucleotide"
uuccuuuugguuccaagucca

SEQ ID NO: 3612 - RNA, 21 nt, Artificial Sequence
  source: /note="Description of Artificial Sequence: Synthetic oligonucleotide"
gcagccuuuuccuuagaacaa

SEQ ID NO: 3613 - RNA, 21 nt, Artificial Sequence
  source: /note="Description of Artificial Sequence: Synthetic oligonucleotide"
aguaauauuuuaagauggacu

SEQ ID NO: 3614 - RNA, 21 nt, Artificial Sequence
  source: /note="Description of Artificial Sequence: Synthetic oligonucleotide"
aaaauccacagcuauauccua

SEQ ID NO: 3615 - RNA, 21 nt, Artificial Sequence
  source: /note="Description of Artificial Sequence: Synthetic oligonucleotide"
uccuucacugaacaugccuaa

SEQ ID NO: 3616 - RNA, 21 nt, Artificial Sequence
  source: /note="Description of Artificial Sequence: Synthetic oligonucleotide"
cacugaacaugccuaguccaa

SEQ ID NO: 3617 - RNA, 21 nt, Artificial Sequence
  source: /note="Description of Artificial Sequence: Synthetic oligonucleotide"
aaguguuauaccaacuaaaac

SEQ ID NO: 3618 - RNA, 21 nt, Artificial Sequence
  source: /note="Description of Artificial Sequence: Synthetic oligonucleotide"
uuccaccaugauuaagggucu

SEQ ID NO: 3619 - RNA, 21 nt, Artificial Sequence
  source: /note="Description of Artificial Sequence: Synthetic oligonucleotide"
gaacaugccuaguccaacauu

SEQ ID NO: 3620 - RNA, 21 nt, Artificial Sequence
  source: /note="Description of Artificial Sequence: Synthetic oligonucleotide"
aucaguaguguacauuaccau

SEQ ID NO: 3621 - RNA, 21 nt, Artificial Sequence
  source: /note="Description of Artificial Sequence: Synthetic oligonucleotide"
auccaaguguuauaccaacua

SEQ ID NO: 3622 - RNA, 21 nt, Artificial Sequence
  source: /note="Description of Artificial Sequence: Synthetic oligonucleotide"
ccaaguccaauauggcaacua

SEQ ID NO: 3623 - RNA, 21 nt, Artificial Sequence
  source: /note="Description of Artificial Sequence: Synthetic oligonucleotide"
aucucagaccuugugaaggua

SEQ ID NO: 3624 - RNA, 21 nt, Artificial Sequence
  source: /note="Description of Artificial Sequence: Synthetic oligonucleotide"
cauuucacugucuaggcuaca

SEQ ID NO: 3625 - RNA, 21 nt, Artificial Sequence
  source: /note="Description of Artificial Sequence: Synthetic oligonucleotide"
ccacagcuauauccugaugcu

SEQ ID NO: 3626 - RNA, 21 nt, Artificial Sequence
  source: /note="Description of Artificial Sequence: Synthetic oligonucleotide"
cuucacugaacaugccuagua

SEQ ID NO: 3627 - RNA, 21 nt, Artificial Sequence
  source: /note="Description of Artificial Sequence: Synthetic oligonucleotide"
gugguugagagugcuuaugaa

SEQ ID NO: 3628 - RNA, 21 nt, Artificial Sequence
  source: /note="Description of Artificial Sequence: Synthetic oligonucleotide"
caaacucaaaggcuacacaua

SEQ ID NO: 3629 - RNA, 21 nt, Artificial Sequence
  source: /note="Description of Artificial Sequence: Synthetic oligonucleotide"
auaucaguaguguacauuaca

SEQ ID NO: 3630 - RNA, 21 nt, Artificial Sequence
  source: /note="Description of Artificial Sequence: Synthetic oligonucleotide"
caaccaacuauccaaguguua

SEQ ID NO: 3631 - RNA, 21 nt, Artificial Sequence
  source: /note="Description of Artificial Sequence: Synthetic oligonucleotide"
ucaucgaagacaaauugaaga

SEQ ID NO: 3632 - RNA, 21 nt, Artificial Sequence
  source: /note="Description of Artificial Sequence: Synthetic oligonucleotide"
gcagauuuggcagagaguaua

SEQ ID NO: 3633 - RNA, 21 nt, Artificial Sequence
  source: /note="Description of Artificial Sequence: Synthetic oligonucleotide"
cuccuucacugaacaugccua

SEQ ID NO: 3634 - RNA, 21 nt, Artificial Sequence
  source: /note="Description of Artificial Sequence: Synthetic oligonucleotide"
caugccuaguccaacauuuuu

SEQ ID NO: 3635 - RNA, 21 nt, Artificial Sequence
  source: /note="Description of Artificial Sequence: Synthetic oligonucleotide"
ugccaucaguaucuuaaugaa

SEQ ID NO: 3636 - RNA, 21 nt, Artificial Sequence
  source: /note="Description of Artificial Sequence: Synthetic oligonucleotide"
gccaucaguaucuuaaugaaa

SEQ ID NO: 3637 - RNA, 21 nt, Artificial Sequence
  source: /note="Description of Artificial Sequence: Synthetic oligonucleotide"
uuagaacaccaaagauugucu

SEQ ID NO: 3638 - RNA, 21 nt, Artificial Sequence
  source: /note="Description of Artificial Sequence: Synthetic oligonucleotide"
aucauuucacugucuaggcua

SEQ ID NO: 3639 - RNA, 21 nt, Artificial Sequence
  source: /note="Description of Artificial Sequence: Synthetic oligonucleotide"
ucacugucuaggcuacaacaa

SEQ ID NO: 3640 - RNA, 21 nt, Artificial Sequence
  source: /note="Description of Artificial Sequence: Synthetic oligonucleotide"
ggauccaguguauaaauccaa

SEQ ID NO: 3641 - RNA, 21 nt, Artificial Sequence
  source: /note="Description of Artificial Sequence: Synthetic oligonucleotide"
caacuauccaaguguuauaca

SEQ ID NO: 3642 - RNA, 21 nt, Artificial Sequence
  source: /note="Description of Artificial Sequence: Synthetic oligonucleotide"
uugguuccaaguccaauauga

SEQ ID NO: 3643 - RNA, 21 nt, Artificial Sequence
  source: /note="Description of Artificial Sequence: Synthetic oligonucleotide"
ugcuuaugaggugaucaaacu

SEQ ID NO: 3644 - RNA, 21 nt, Artificial Sequence
  source: /note="Description of Artificial Sequence: Synthetic oligonucleotide"
aaacucaaaggcuacacauca

SEQ ID NO: 3645 - RNA, 21 nt, Artificial Sequence
  source: /note="Description of Artificial Sequence: Synthetic oligonucleotide"
ucucagaccuugugaagguga

SEQ ID NO: 3646 - RNA, 21 nt, Artificial Sequence
  source: /note="Description of Artificial Sequence: Synthetic oligonucleotide"
uaaaauccacagcuauauccu

SEQ ID NO: 3647 - RNA, 21 nt, Artificial Sequence
  source: /note="Description of Artificial Sequence: Synthetic oligonucleotide"
ccuucacugaacaugccuagu

SEQ ID NO: 3648 - RNA, 21 nt, Artificial Sequence
  source: /note="Description of Artificial Sequence: Synthetic oligonucleotide"
gggauccaguguauaaaucca

SEQ ID NO: 3649 - RNA, 21 nt, Artificial Sequence
  source: /note="Description of Artificial Sequence: Synthetic oligonucleotide"
caauaaaccuugaacagugaa

SEQ ID NO: 3650 - RNA, 21 nt, Artificial Sequence
  source: /note="Description of Artificial Sequence: Synthetic oligonucleotide"
ggccugugccaucaguaucuu

SEQ ID NO: 3651 - RNA, 21 nt, Artificial Sequence
  source: /note="Description of Artificial Sequence: Synthetic oligonucleotide"
uuguugaugucaucgaagaca

SEQ ID NO: 3652 - RNA, 21 nt, Artificial Sequence
  source: /note="Description of Artificial Sequence: Synthetic oligonucleotide"
ggaucuuauuuugugaacuau

SEQ ID NO: 3653 - RNA, 21 nt, Artificial Sequence
  source: /note="Description of Artificial Sequence: Synthetic oligonucleotide"
aaggaucuuauuuugugaacu

SEQ ID NO: 3654 - RNA, 21 nt, Artificial Sequence
  source: /note="Description of Artificial Sequence: Synthetic oligonucleotide"
aucaugucuugugcauaauua

SEQ ID NO: 3655 - RNA, 21 nt, Artificial Sequence
  source: /note="Description of Artificial Sequence: Synthetic oligonucleotide"
ugucauaucauuucacugucu

SEQ ID NO: 3656 - RNA, 21 nt, Artificial Sequence
  source: /note="Description of Artificial Sequence: Synthetic oligonucleotide"
ucauaucauuucacugucuaa

SEQ ID NO: 3657 - RNA, 21 nt, Artificial Sequence
  source: /note="Description of Artificial Sequence: Synthetic oligonucleotide"
auuuauaaucuucuaaaggaa

SEQ ID NO: 3658 - RNA, 21 nt, Artificial Sequence
  source: /note="Description of Artificial Sequence: Synthetic oligonucleotide"
ugguuuguaaaauccacagcu

SEQ ID NO: 3659 - RNA, 21 nt, Artificial Sequence
  source: /note="Description of Artificial Sequence: Synthetic oligonucleotide"
augcuggaugguauuaaucuu

SEQ ID NO: 3660 - RNA, 21 nt, Artificial Sequence
  source: /note="Description of Artificial Sequence: Synthetic oligonucleotide"
aacuauaucaguaguguacau

SEQ ID NO: 3661 - RNA, 21 nt, Artificial Sequence
  source: /note="Description of Artificial Sequence: Synthetic oligonucleotide"
aucaacuccugaaguuagaaa

SEQ ID NO: 3662 - RNA, 21 nt, Artificial Sequence
  source: /note="Description of Artificial Sequence: Synthetic oligonucleotide"
cuggaugguauuaaucuugua

SEQ ID NO: 3663 - RNA, 21 nt, Artificial Sequence
  source: /note="Description of Artificial Sequence: Synthetic oligonucleotide"
uaucauuucacugucuaggcu

SEQ ID NO: 3664 - RNA, 21 nt, Artificial Sequence
  source: /note="Description of Artificial Sequence: Synthetic oligonucleotide"
guaaaauccacagcuauauca

SEQ ID NO: 3665 - RNA, 21 nt, Artificial Sequence
  source: /note="Description of Artificial Sequence: Synthetic oligonucleotide"
uccuuaguguuccuugcauuu

SEQ ID NO: 3666 - RNA, 21 nt, Artificial Sequence
  source: /note="Description of Artificial Sequence: Synthetic oligonucleotide"
cauaucauuucacugucuaga

SEQ ID NO: 3667 - RNA, 21 nt, Artificial Sequence
  source: /note="Description of Artificial Sequence: Synthetic oligonucleotide"
aacaucaacuccugaaguuaa

SEQ ID NO: 3668 - RNA, 21 nt, Artificial Sequence
  source: /note="Description of Artificial Sequence: Synthetic oligonucleotide"
ccugaugcuggaugguauuaa

SEQ ID NO: 3669 - RNA, 21 nt, Artificial Sequence
  source: /note="Description of Artificial Sequence: Synthetic oligonucleotide"
aaugcaaccaacuauccaagu

SEQ ID NO: 3670 - RNA, 21 nt, Artificial Sequence
  source: /note="Description of Artificial Sequence: Synthetic oligonucleotide"
uuuacggaauaaaggaugaua

SEQ ID NO: 3671 - RNA, 21 nt, Artificial Sequence
  source: /note="Description of Artificial Sequence: Synthetic oligonucleotide"
uuccuuaguguuccuugcauu

SEQ ID NO: 3672 - RNA, 21 nt, Artificial Sequence
  source: /note="Description of Artificial Sequence: Synthetic oligonucleotide"
caaugcaaccaacuauccaaa

SEQ ID NO: 3673 - RNA, 21 nt, Artificial Sequence
  source: /note="Description of Artificial Sequence: Synthetic oligonucleotide"
agauuuggcagagaguauaau

SEQ ID NO: 3674 - RNA, 21 nt, Artificial Sequence
  source: /note="Description of Artificial Sequence: Synthetic oligonucleotide"
uuuccaccaugauuaagggua

SEQ ID NO: 3675 - RNA, 21 nt, Artificial Sequence
  source: /note="Description of Artificial Sequence: Synthetic oligonucleotide"
acugguuagugugaaauaguu

SEQ ID NO: 3676 - RNA, 21 nt, Artificial Sequence
  source: /note="Description of Artificial Sequence: Synthetic oligonucleotide"
caaguccaauauggcaacucu

SEQ ID NO: 3677 - RNA, 21 nt, Artificial Sequence
  source: /note="Description of Artificial Sequence: Synthetic oligonucleotide"
uccaccaugauuaagggucuu

SEQ ID NO: 3678 - RNA, 21 nt, Artificial Sequence
  source: /note="Description of Artificial Sequence: Synthetic oligonucleotide"
ucauuucacugucuaggcuaa

SEQ ID NO: 3679 - RNA, 21 nt, Artificial Sequence
  source: /note="Description of Artificial Sequence: Synthetic oligonucleotide"
uguccuuuuuaucugaucugu

SEQ ID NO: 3680 - RNA, 21 nt, Artificial Sequence
  source: /note="Description of Artificial Sequence: Synthetic oligonucleotide"
ccaguguauaaauccaauaua

SEQ ID NO: 3681 - RNA, 21 nt, Artificial Sequence
  source: /note="Description of Artificial Sequence: Synthetic oligonucleotide"
uccaaguguuauaccaacuaa

SEQ ID NO: 3682 - RNA, 21 nt, Artificial Sequence
  source: /note="Description of Artificial Sequence: Synthetic oligonucleotide"
gaacaccaaagauugucucua

SEQ ID NO: 3683 - RNA, 21 nt, Artificial Sequence
  source: /note="Description of Artificial Sequence: Synthetic oligonucleotide"
aacaccaaagauugucucuga

SEQ ID NO: 3684 - RNA, 21 nt, Artificial Sequence
  source: /note="Description of Artificial Sequence: Synthetic oligonucleotide"
auguuguccuuuuuaucugau

SEQ ID NO: 3685 - RNA, 21 nt, Artificial Sequence
  source: /note="Description of Artificial Sequence: Synthetic oligonucleotide"
ucaacuccugaaguuagaaau

SEQ ID NO: 3686 - RNA, 21 nt, Artificial Sequence
  source: /note="Description of Artificial Sequence: Synthetic oligonucleotide"
aacuauccaaguguuauacca

SEQ ID NO: 3687 - RNA, 21 nt, Artificial Sequence
  source: /note="Description of Artificial Sequence: Synthetic oligonucleotide"
gguauuaaucuuguguagucu

SEQ ID NO: 3688 - RNA, 21 nt, Artificial Sequence
  source: /note="Description of Artificial Sequence: Synthetic oligonucleotide"
ggcuccuucacugaacaugca

SEQ ID NO: 3689 - RNA, 21 nt, Artificial Sequence
  source: /note="Description of Artificial Sequence: Synthetic oligonucleotide"
uaucaguaguguacauuacca

SEQ ID NO: 3690 - RNA, 21 nt, Artificial Sequence
  source: /note="Description of Artificial Sequence: Synthetic oligonucleotide"
cagccuuuuccuuagaacaca

SEQ ID NO: 3691 - RNA, 21 nt, Artificial Sequence
  source: /note="Description of Artificial Sequence: Synthetic oligonucleotide"
cugguuagugugaaauaguua

SEQ ID NO: 3692 - RNA, 21 nt, Artificial Sequence
  source: /note="Description of Artificial Sequence: Synthetic oligonucleotide"
acuauaucaguaguguacauu

SEQ ID NO: 3693 - RNA, 21 nt, Artificial Sequence
  source: /note="Description of Artificial Sequence: Synthetic oligonucleotide"
uauaucaguaguguacauuaa

SEQ ID NO: 3694 - RNA, 21 nt, Artificial Sequence
  source: /note="Description of Artificial Sequence: Synthetic oligonucleotide"
guaauauuuuaagauggacua

SEQ ID NO: 3695 - RNA, 21 nt, Artificial Sequence
  source: /note="Description of Artificial Sequence: Synthetic oligonucleotide"
uuuuaagauggacugggaaaa

SEQ ID NO: 3696 - RNA, 21 nt, Artificial Sequence
  source: /note="Description of Artificial Sequence: Synthetic oligonucleotide"
uucacugaacaugccuaguca

SEQ ID NO: 3697 - RNA, 21 nt, Artificial Sequence
  source: /note="Description of Artificial Sequence: Synthetic oligonucleotide"
accaacuauccaaguguuaua

SEQ ID NO: 3698 - RNA, 21 nt, Artificial Sequence
  source: /note="Description of Artificial Sequence: Synthetic oligonucleotide"
ccaaguguuauaccaacuaaa

SEQ ID NO: 3699 - RNA, 21 nt, Artificial Sequence
  source: /note="Description of Artificial Sequence: Synthetic oligonucleotide"
aguaauauuuuaagauggacu

SEQ ID NO: 3700 - RNA, 21 nt, Artificial Sequence
  source: /note="Description of Artificial Sequence: Synthetic oligonucleotide"
aaaauccacagcuauauccua

SEQ ID NO: 3701 - RNA, 21 nt, Artificial Sequence
  source: /note="Description of Artificial Sequence: Synthetic oligonucleotide"
uccuucacugaacaugccuaa

SEQ ID NO: 3702 - RNA, 21 nt, Artificial Sequence
  source: /note="Description of Artificial Sequence: Synthetic oligonucleotide"
cacugaacaugccuaguccaa

SEQ ID NO: 3703 - RNA, 21 nt, Artificial Sequence
  source: /note="Description of Artificial Sequence: Synthetic oligonucleotide"
aaguguuauaccaacuaaaac

SEQ ID NO: 3704 - RNA, 21 nt, Artificial Sequence
  source: /note="Description of Artificial Sequence: Synthetic oligonucleotide"
uuccaccaugauuaagggucu

SEQ ID NO: 3705 - RNA, 21 nt, Artificial Sequence
  source: /note="Description of Artificial Sequence: Synthetic oligonucleotide"
gaacaugccuaguccaacauu

SEQ ID NO: 3706 - RNA, 21 nt, Artificial Sequence
  source: /note="Description of Artificial Sequence: Synthetic oligonucleotide"
aucaguaguguacauuaccau

SEQ ID NO: 3707 - RNA, 21 nt, Artificial Sequence
  source: /note="Description of Artificial Sequence: Synthetic oligonucleotide"
auccaaguguuauaccaacua

SEQ ID NO: 3708 - RNA, 21 nt, Artificial Sequence
  source: /note="Description of Artificial Sequence: Synthetic oligonucleotide"
ccaaguccaauauggcaacua

SEQ ID NO: 3709 - RNA, 21 nt, Artificial Sequence
  source: /note="Description of Artificial Sequence: Synthetic oligonucleotide"
cauuucacugucuaggcuaca

SEQ ID NO: 3710 - RNA, 21 nt, Artificial Sequence
  source: /note="Description of Artificial Sequence: Synthetic oligonucleotide"
ccacagcuauauccugaugcu

SEQ ID NO: 3711 - RNA, 21 nt, Artificial Sequence
  source: /note="Description of Artificial Sequence: Synthetic oligonucleotide"
cuucacugaacaugccuagua

SEQ ID NO: 3712 - RNA, 21 nt, Artificial Sequence
  source: /note="Description of Artificial Sequence: Synthetic oligonucleotide"
gugguugagagugcuuaugaa

SEQ ID NO: 3713 - RNA, 21 nt, Artificial Sequence
  source: /note="Description of Artificial Sequence: Synthetic oligonucleotide"
auaucaguaguguacauuaca

SEQ ID NO: 3714 - RNA, 21 nt, Artificial Sequence
  source: /note="Description of Artificial Sequence: Synthetic oligonucleotide"
caaccaacuauccaaguguua

SEQ ID NO: 3715 - RNA, 21 nt, Artificial Sequence
  source: /note="Description of Artificial Sequence: Synthetic oligonucleotide"
gcagauuuggcagagaguaua

SEQ ID NO: 3716 - RNA, 21 nt, Artificial Sequence
  source: /note="Description of Artificial Sequence: Synthetic oligonucleotide"
cuccuucacugaacaugccua

SEQ ID NO: 3717 - RNA, 21 nt, Artificial Sequence
  source: /note="Description of Artificial Sequence: Synthetic oligonucleotide"
caugccuaguccaacauuuuu

SEQ ID NO: 3718 - RNA, 21 nt, Artificial Sequence
  source: /note="Description of Artificial Sequence: Synthetic oligonucleotide"
ugccaucaguaucuuaaugaa

SEQ ID NO: 3719 - RNA, 21 nt, Artificial Sequence
  source: /note="Description of Artificial Sequence: Synthetic oligonucleotide"
gccaucaguaucuuaaugaaa

SEQ ID NO: 3720 - RNA, 21 nt, Artificial Sequence
  source: /note="Description of Artificial Sequence: Synthetic oligonucleotide"
uuagaacaccaaagauugucu

SEQ ID NO: 3721 - RNA, 21 nt, Artificial Sequence
  source: /note="Description of Artificial Sequence: Synthetic oligonucleotide"
aucauuucacugucuaggcua

SEQ ID NO: 3722 - RNA, 21 nt, Artificial Sequence
  source: /note="Description of Artificial Sequence: Synthetic oligonucleotide"
ucacugucuaggcuacaacaa

SEQ ID NO: 3723 - RNA, 21 nt, Artificial Sequence
  source: /note="Description of Artificial Sequence: Synthetic oligonucleotide"
caacuauccaaguguuauaca

SEQ ID NO: 3724 - RNA, 21 nt, Artificial Sequence
  source: /note="Description of Artificial Sequence: Synthetic oligonucleotide"
uugguuccaaguccaauauga

SEQ ID NO: 3725 - RNA, 21 nt, Artificial Sequence
  source: /note="Description of Artificial Sequence: Synthetic oligonucleotide"
ugcuuaugaggugaucaaacu

SEQ ID NO: 3726 - RNA, 21 nt, Artificial Sequence
  source: /note="Description of Artificial Sequence: Synthetic oligonucleotide"
ucucagaccuugugaagguga

SEQ ID NO: 3727 - RNA, 21 nt, Artificial Sequence
  source: /note="Description of Artificial Sequence: Synthetic oligonucleotide"
uaaaauccacagcuauauccu

SEQ ID NO: 3728 - RNA, 21 nt, Artificial Sequence
  source: /note="Description of Artificial Sequence: Synthetic oligonucleotide"
ccuucacugaacaugccuagu

SEQ ID NO: 3729 - RNA, 21 nt, Artificial Sequence
  source: /note="Description of Artificial Sequence: Synthetic oligonucleotide"
gggauccaguguauaaaucca

SEQ ID NO: 3730 - RNA, 21 nt, Artificial Sequence
  source: /note="Description of Artificial Sequence: Synthetic oligonucleotide"
caauaaaccuugaacagugaa

SEQ ID NO: 3731 - RNA, 21 nt, Artificial Sequence
  source: /note="Description of Artificial Sequence: Synthetic oligonucleotide"
ggccugugccaucaguaucuu

SEQ ID NO: 3732 - RNA, 21 nt, Artificial Sequence
  source: /note="Description of Artificial Sequence: Synthetic oligonucleotide"
uuguugaugucaucgaagaca

SEQ ID NO: 3733 - RNA, 21 nt, Artificial Sequence
  source: /note="Description of Artificial Sequence: Synthetic oligonucleotide"
agauuuggcagagaguauaau

SEQ ID NO: 3734 - RNA, 21 nt, Artificial Sequence
  source: /note="Description of Artificial Sequence: Synthetic oligonucleotide"
uuuccaccaugauuaagggua

SEQ ID NO: 3735 - RNA, 21 nt, Artificial Sequence
  source: /note="Description of Artificial Sequence: Synthetic oligonucleotide"
cuaggcuacaacaggauucua

SEQ ID NO: 3736 - RNA, 21 nt, Artificial Sequence
  source: /note="Description of Artificial Sequence: Synthetic oligonucleotide"
uggagguugugcauguuguca

SEQ ID NO: 3737 - RNA, 21 nt, Artificial Sequence
  source: /note="Description of Artificial Sequence: Synthetic oligonucleotide"
gcuccuucacugaacaugccu

SEQ ID NO: 3738 - RNA, 21 nt, Artificial Sequence
  source: /note="Description of Artificial Sequence: Synthetic oligonucleotide"
cuuuugguuccaaguccaaua

SEQ ID NO: 3739 - RNA, 21 nt, Artificial Sequence
  source: /note="Description of Artificial Sequence: Synthetic oligonucleotide"
gccugugccaucaguaucuua

SEQ ID NO: 3740 - RNA, 21 nt, Artificial Sequence
  source: /note="Description of Artificial Sequence: Synthetic oligonucleotide"
gcuuaugaggugaucaaacua

SEQ ID NO: 3741 - RNA, 21 nt, Artificial Sequence
  source: /note="Description of Artificial Sequence: Synthetic oligonucleotide"
cuuaugaggugaucaaacuca

SEQ ID NO: 3742 - RNA, 21 nt, Artificial Sequence
  source: /note="Description of Artificial Sequence: Synthetic oligonucleotide"
ccuugcauuuugggacagaau

SEQ ID NO: 3743 - RNA, 21 nt, Artificial Sequence
  source: /note="Description of Artificial Sequence: Synthetic oligonucleotide"
gguuccaaguccaauauggca

SEQ ID NO: 3744 - RNA, 21 nt, Artificial Sequence
  source: /note="Description of Artificial Sequence: Synthetic oligonucleotide"
cacugucuaggcuacaacaga

SEQ ID NO: 3745 - RNA, 21 nt, Artificial Sequence
  source: /note="Description of Artificial Sequence: Synthetic oligonucleotide"
acugucuaggcuacaacagga

SEQ ID NO: 3746 - RNA, 21 nt, Artificial Sequence
  source: /note="Description of Artificial Sequence: Synthetic oligonucleotide"
aauaagauuacaguuguugga

SEQ ID NO: 3747 - RNA, 21 nt, Artificial Sequence
  source: /note="Description of Artificial Sequence: Synthetic oligonucleotide"
guugagagugcuuaugaggua

SEQ ID NO: 3748 - RNA, 21 nt, Artificial Sequence
  source: /note="Description of Artificial Sequence: Synthetic oligonucleotide"
gucuaggcuacaacaggauua

SEQ ID NO: 3749 - RNA, 21 nt, Artificial Sequence
  source: /note="Description of Artificial Sequence: Synthetic oligonucleotide"
ucuaggcuacaacaggauucu

SEQ ID NO: 3750 - RNA, 21 nt, Artificial Sequence
  source: /note="Description of Artificial Sequence: Synthetic oligonucleotide"
guggagguugugcauguugua

SEQ ID NO: 3751 - RNA, 21 nt, Artificial Sequence
  source: /note="Description of Artificial Sequence: Synthetic oligonucleotide"
ugaggugaucaaacucaaaga

SEQ ID NO: 3752 - RNA, 21 nt, Artificial Sequence
  source: /note="Description of Artificial Sequence: Synthetic oligonucleotide"
gugaucaaacucaaaggcuaa

SEQ ID NO: 3753 - RNA, 21 nt, Artificial Sequence
  source: /note="Description of Artificial Sequence: Synthetic oligonucleotide"
ugaggaagaggcccguuugaa

SEQ ID NO: 3754 - RNA, 21 nt, Artificial Sequence
  source: /note="Description of Artificial Sequence: Synthetic oligonucleotide"
acaagcaggugguugagagua

SEQ ID NO: 3755 - RNA, 21 nt, Artificial Sequence
  source: /note="Description of Artificial Sequence: Synthetic oligonucleotide"
cagauuuggcagagaguauaa

SEQ ID NO: 3756 - RNA, 21 nt, Artificial Sequence
  source: /note="Description of Artificial Sequence: Synthetic oligonucleotide"
gugcuuaugaggugaucaaac

SEQ ID NO: 3757 - RNA, 21 nt, Artificial Sequence
  source: /note="Description of Artificial Sequence: Synthetic oligonucleotide"
agcagauuuggcagagaguau

SEQ ID NO: 3758 - RNA, 21 nt, Artificial Sequence
  source: /note="Description of Artificial Sequence: Synthetic oligonucleotide"
auuuggcagagaguauaauga

SEQ ID NO: 3759 - RNA, 21 nt, Artificial Sequence
  source: /note="Description of Artificial Sequence: Synthetic oligonucleotide"
uuuggcagagaguauaaugaa

SEQ ID NO: 3760 - RNA, 21 nt, Artificial Sequence
  source: /note="Description of Artificial Sequence: Synthetic oligonucleotide"
cuugcauuuugggacagaaua

SEQ ID NO: 3761 - RNA, 21 nt, Artificial Sequence
  source: /note="Description of Artificial Sequence: Synthetic oligonucleotide"
auggaaucucagaccuuguga

SEQ ID NO: 3762 - RNA, 21 nt, Artificial Sequence
  source: /note="Description of Artificial Sequence: Synthetic oligonucleotide"
cacagcuauauccugaugcua

SEQ ID NO: 3763 - RNA, 21 nt, Artificial Sequence
  source: /note="Description of Artificial Sequence: Synthetic oligonucleotide"
gaggaagaggcccguuugaaa

SEQ ID NO: 3764 - RNA, 21 nt, Artificial Sequence
  source: /note="Description of Artificial Sequence: Synthetic oligonucleotide"
ucugaggaagaggcccguuua

SEQ ID NO: 3765 - RNA, 21 nt, Artificial Sequence
  source: /note="Description of Artificial Sequence: Synthetic oligonucleotide"
cacauccugggauccagugua

SEQ ID NO: 3766 - RNA, 21 nt, Artificial Sequence
  source: /note="Description of Artificial Sequence: Synthetic oligonucleotide"
agccuuuuccuuagaacacca

SEQ ID NO: 3767 - RNA, 21 nt, Artificial Sequence
  source: /note="Description of Artificial Sequence: Synthetic oligonucleotide"
ucaacugguuagugugaaaua

SEQ ID NO: 3768 - RNA, 23 nt, Artificial Sequence
  source: /note="Description of Artificial Sequence: Synthetic oligonucleotide"
uuuaaucacagaucagauaaaaa

SEQ ID NO: 3769 - RNA, 23 nt, Artificial Sequence
  source: /note="Description of Artificial Sequence: Synthetic oligonucleotide"
aacuauuucacacuaaccaguug

SEQ ID NO: 3770 - RNA, 23 nt, Artificial Sequence
  source: /note="Description of Artificial Sequence: Synthetic oligonucleotide"
aaauguuggacuaggcauguuca

SEQ ID NO: 3771 - RNA, 23 nt, Artificial Sequence
  source: /note="Description of Artificial Sequence: Synthetic oligonucleotide"
agaguugccauauuggacuugga

SEQ ID NO: 3772 - RNA, 23 nt, Artificial Sequence
  source: /note="Description of Artificial Sequence: Synthetic oligonucleotide"
aagacccuuaaucaugguggaaa

SEQ ID NO: 3773 - RNA, 23 nt, Artificial Sequence
  source: /note="Description of Artificial Sequence: Synthetic oligonucleotide"
uuagccuagacagugaaaugaua

SEQ ID NO: 3774 - RNA, 23 nt, Artificial Sequence
  source: /note="Description of Artificial Sequence: Synthetic oligonucleotide"
acagaucagauaaaaaggacaac

SEQ ID NO: 3775 - RNA, 23 nt, Artificial Sequence
  source: /note="Description of Artificial Sequence: Synthetic oligonucleotide"
uauauuggauuuauacacuggau

SEQ ID NO: 3776 - RNA, 23 nt, Artificial Sequence
  source: /note="Description of Artificial Sequence: Synthetic oligonucleotide"
uuaguugguauaacacuuggaua

SEQ ID NO: 3777 - RNA, 23 nt, Artificial Sequence
  source: /note="Description of Artificial Sequence: Synthetic oligonucleotide"
uuucaauuugucuucgaugacau

SEQ ID NO: 3778 - RNA, 23 nt, Artificial Sequence
  source: /note="Description of Artificial Sequence: Synthetic oligonucleotide"
uagagacaaucuuugguguucua

SEQ ID NO: 3779 - RNA, 23 nt, Artificial Sequence
  source: /note="Description of Artificial Sequence: Synthetic oligonucleotide"
ucagagacaaucuuugguguucu

SEQ ID NO: 3780 - RNA, 23 nt, Artificial Sequence
  source: /note="Description of Artificial Sequence: Synthetic oligonucleotide"
aucagauaaaaaggacaacaugc

SEQ ID NO: 3781 - RNA, 23 nt, Artificial Sequence
  source: /note="Description of Artificial Sequence: Synthetic oligonucleotide"
auuucuaacuucaggaguugaug

SEQ ID NO: 3782 - RNA, 23 nt, Artificial Sequence
  source: /note="Description of Artificial Sequence: Synthetic oligonucleotide"
ugguauaacacuuggauaguugg

SEQ ID NO: 3783 - RNA, 23 nt, Artificial Sequence
  source: /note="Description of Artificial Sequence: Synthetic oligonucleotide"
uaaucuuugguguucuaaggaaa

SEQ ID NO: 3784 - RNA, 23 nt, Artificial Sequence
  source: /note="Description of Artificial Sequence: Synthetic oligonucleotide"
agacuacacaagauuaauaccau

SEQ ID NO: 3785 - RNA, 23 nt, Artificial Sequence
  source: /note="Description of Artificial Sequence: Synthetic oligonucleotide"
ugcauguucagugaaggagccag

SEQ ID NO: 3786 - RNA, 23 nt, Artificial Sequence
  source: /note="Description of Artificial Sequence: Synthetic oligonucleotide"
ugguaauguacacuacugauaua

SEQ ID NO: 3787 - RNA, 23 nt, Artificial Sequence
  source: /note="Description of Artificial Sequence: Synthetic oligonucleotide"
uguguucuaaggaaaaggcugcc

SEQ ID NO: 3788 - RNA, 23 nt, Artificial Sequence
  source: /note="Description of Artificial Sequence: Synthetic oligonucleotide"
uaacuauuucacacuaaccaguu

SEQ ID NO: 3789 - RNA, 23 nt, Artificial Sequence
  source: /note="Description of Artificial Sequence: Synthetic oligonucleotide"
aauguacacuacugauauaguuc

SEQ ID NO: 3790 - RNA, 23 nt, Artificial Sequence
  source: /note="Description of Artificial Sequence: Synthetic oligonucleotide"
uuaauguacacuacugauauagu

SEQ ID NO: 3791 - RNA, 23 nt, Artificial Sequence
  source: /note="Description of Artificial Sequence: Synthetic oligonucleotide"
uaguccaucuuaaaauauuacug

SEQ ID NO: 3792 - RNA, 23 nt, Artificial Sequence
  source: /note="Description of Artificial Sequence: Synthetic oligonucleotide"
uuuucccaguccaucuuaaaaua

SEQ ID NO: 3793 - RNA, 23 nt, Artificial Sequence
  source: /note="Description of Artificial Sequence: Synthetic oligonucleotide"
agaacuauuucacacuaaccagu

SEQ ID NO: 3794 - RNA, 23 nt, Artificial Sequence
  source: /note="Description of Artificial Sequence: Synthetic oligonucleotide"
ugacuaggcauguucagugaagg

SEQ ID NO: 3795 - RNA, 23 nt, Artificial Sequence
  source: /note="Description of Artificial Sequence: Synthetic oligonucleotide"
uauaacacuuggauaguugguug

SEQ ID NO: 3796 - RNA, 23 nt, Artificial Sequence
  source: /note="Description of Artificial Sequence: Synthetic oligonucleotide"
uuuaguugguauaacacuuggau

SEQ ID NO: 3797 - RNA, 23 nt, Artificial Sequence
  source: /note="Description of Artificial Sequence: Synthetic oligonucleotide"
uggacuuggaaccaaaaggaauc

SEQ ID NO: 3798 - RNA, 23 nt, Artificial Sequence
  source: /note="Description of Artificial Sequence: Synthetic oligonucleotide"
uuguucuaaggaaaaggcugcca

SEQ ID NO: 3799 - RNA, 23 nt, Artificial Sequence
  source: /note="Description of Artificial Sequence: Synthetic oligonucleotide"
aguccaucuuaaaauauuacugc

SEQ ID NO: 3800 - RNA, 23 nt, Artificial Sequence
  source: /note="Description of Artificial Sequence: Synthetic oligonucleotide"
uaggauauagcuguggauuuuac

SEQ ID NO: 3801 - RNA, 23 nt, Artificial Sequence
  source: /note="Description of Artificial Sequence: Synthetic oligonucleotide"
uuaggcauguucagugaaggagc

SEQ ID NO: 3802 - RNA, 23 nt, Artificial Sequence
  source: /note="Description of Artificial Sequence: Synthetic oligonucleotide"
uuggacuaggcauguucagugaa

SEQ ID NO: 3803 - RNA, 23 nt, Artificial Sequence
  source: /note="Description of Artificial Sequence: Synthetic oligonucleotide"
guuuuaguugguauaacacuugg

SEQ ID NO: 3804 - RNA, 23 nt, Artificial Sequence
  source: /note="Description of Artificial Sequence: Synthetic oligonucleotide"
agacccuuaaucaugguggaaac

SEQ ID NO: 3805 - RNA, 23 nt, Artificial Sequence
  source: /note="Description of Artificial Sequence: Synthetic oligonucleotide"
aauguuggacuaggcauguucag

SEQ ID NO: 3806 - RNA, 23 nt, Artificial Sequence
  source: /note="Description of Artificial Sequence: Synthetic oligonucleotide"
augguaauguacacuacugauau

SEQ ID NO: 3807 - RNA, 23 nt, Artificial Sequence
  source: /note="Description of Artificial Sequence: Synthetic oligonucleotide"
uaguugguauaacacuuggauag

SEQ ID NO: 3808 - RNA, 23 nt, Artificial Sequence
  source: /note="Description of Artificial Sequence: Synthetic oligonucleotide"
uaguugccauauuggacuuggaa

SEQ ID NO: 3809 - RNA, 23 nt, Artificial Sequence
  source: /note="Description of Artificial Sequence: Synthetic oligonucleotide"
uaccuucacaaggucugagauuc

SEQ ID NO: 3810 - RNA, 23 nt, Artificial Sequence
  source: /note="Description of Artificial Sequence: Synthetic oligonucleotide"
uguagccuagacagugaaaugau

SEQ ID NO: 3811 - RNA, 23 nt, Artificial Sequence
  source: /note="Description of Artificial Sequence: Synthetic oligonucleotide"
agcaucaggauauagcuguggau

SEQ ID NO: 3812 - RNA, 23 nt, Artificial Sequence
  source: /note="Description of Artificial Sequence: Synthetic oligonucleotide"
uacuaggcauguucagugaagga

SEQ ID NO: 3813 - RNA, 23 nt, Artificial Sequence
  source: /note="Description of Artificial Sequence: Synthetic oligonucleotide"
uucauaagcacucucaaccaccu

SEQ ID NO: 3814 - RNA, 23 nt, Artificial Sequence
  source: /note="Description of Artificial Sequence: Synthetic oligonucleotide"
uauguguagccuuugaguuugau

SEQ ID NO: 3815 - RNA, 23 nt, Artificial Sequence
  source: /note="Description of Artificial Sequence: Synthetic oligonucleotide"
uguaauguacacuacugauauag

SEQ ID NO: 3816 - RNA, 23 nt, Artificial Sequence
  source: /note="Description of Artificial Sequence: Synthetic oligonucleotide"
uaacacuuggauaguugguugca

SEQ ID NO: 3817 - RNA, 23 nt, Artificial Sequence
  source: /note="Description of Artificial Sequence: Synthetic oligonucleotide"
ucuucaauuugucuucgaugaca

SEQ ID NO: 3818 - RNA, 23 nt, Artificial Sequence
  source: /note="Description of Artificial Sequence: Synthetic oligonucleotide"
uauacucucugccaaaucugcua

SEQ ID NO: 3819 - RNA, 23 nt, Artificial Sequence
  source: /note="Description of Artificial Sequence: Synthetic oligonucleotide"
uaggcauguucagugaaggagcc

SEQ ID NO: 3820 - RNA, 23 nt, Artificial Sequence
  source: /note="Description of Artificial Sequence: Synthetic oligonucleotide"
aaaaauguuggacuaggcauguu

SEQ ID NO: 3821 - RNA, 23 nt, Artificial Sequence
  source: /note="Description of Artificial Sequence: Synthetic oligonucleotide"
uucauuaagauacugauggcaca

SEQ ID NO: 3822 - RNA, 23 nt, Artificial Sequence
  source: /note="Description of Artificial Sequence: Synthetic oligonucleotide"
uuucauuaagauacugauggcac

SEQ ID NO: 3823 - RNA, 23 nt, Artificial Sequence
  source: /note="Description of Artificial Sequence: Synthetic oligonucleotide"
agacaaucuuugguguucuaagg

SEQ ID NO: 3824 - RNA, 23 nt, Artificial Sequence
  source: /note="Description of Artificial Sequence: Synthetic oligonucleotide"
uagccuagacagugaaaugauau

SEQ ID NO: 3825 - RNA, 23 nt, Artificial Sequence
  source: /note="Description of Artificial Sequence: Synthetic oligonucleotide"
uuguuguagccuagacagugaaa

SEQ ID NO: 3826 - RNA, 23 nt, Artificial Sequence
  source: /note="Description of Artificial Sequence: Synthetic oligonucleotide"
uuggauuuauacacuggauccca

SEQ ID NO: 3827 - RNA, 23 nt, Artificial Sequence
  source: /note="Description of Artificial Sequence: Synthetic oligonucleotide"
uguauaacacuuggauaguuggu

SEQ ID NO: 3828 - RNA, 23 nt, Artificial Sequence
  source: /note="Description of Artificial Sequence: Synthetic oligonucleotide"
ucauauuggacuuggaaccaaaa

SEQ ID NO: 3829 - RNA, 23 nt, Artificial Sequence
  source: /note="Description of Artificial Sequence: Synthetic oligonucleotide"
aguuugaucaccucauaagcacu

SEQ ID NO: 3830 - RNA, 23 nt, Artificial Sequence
  source: /note="Description of Artificial Sequence: Synthetic oligonucleotide"
ugauguguagccuuugaguuuga

SEQ ID NO: 3831 - RNA, 23 nt, Artificial Sequence
  source: /note="Description of Artificial Sequence: Synthetic oligonucleotide"
ucaccuucacaaggucugagauu

SEQ ID NO: 3832 - RNA, 23 nt, Artificial Sequence
  source: /note="Description of Artificial Sequence: Synthetic oligonucleotide"
aggauauagcuguggauuuuaca

SEQ ID NO: 3833 - RNA, 23 nt, Artificial Sequence
  source: /note="Description of Artificial Sequence: Synthetic oligonucleotide"
acuaggcauguucagugaaggag

SEQ ID NO: 3834 - RNA, 23 nt, Artificial Sequence
  source: /note="Description of Artificial Sequence: Synthetic oligonucleotide"
uggauuuauacacuggaucccag

SEQ ID NO: 3835 - RNA, 23 nt, Artificial Sequence
  source: /note="Description of Artificial Sequence: Synthetic oligonucleotide"
uucacuguucaagguuuauuggg

SEQ ID NO: 3836 - RNA, 23 nt, Artificial Sequence
  source: /note="Description of Artificial Sequence: Synthetic oligonucleotide"
aagauacugauggcacaggccau

SEQ ID NO: 3837 - RNA, 23 nt, Artificial Sequence
  source: /note="Description of Artificial Sequence: Synthetic oligonucleotide"
ugucuucgaugacaucaacaaga

SEQ ID NO: 3838 - RNA, 23 nt, Artificial Sequence
  source: /note="Description of Artificial Sequence: Synthetic oligonucleotide"
auaguucacaaaauaagauccuu

SEQ ID NO: 3839 - RNA, 23 nt, Artificial Sequence
  source: /note="Description of Artificial Sequence: Synthetic oligonucleotide"
aguucacaaaauaagauccuuug

SEQ ID NO: 3840 - RNA, 23 nt, Artificial Sequence
  source: /note="Description of Artificial Sequence: Synthetic oligonucleotide"
uaauuaugcacaagacaugauau

SEQ ID NO: 3841 - RNA, 23 nt, Artificial Sequence
  source: /note="Description of Artificial Sequence: Synthetic oligonucleotide"
agacagugaaaugauaugacauc

SEQ ID NO: 3842 - RNA, 23 nt, Artificial Sequence
  source: /note="Description of Artificial Sequence: Synthetic oligonucleotide"
uuagacagugaaaugauaugaca

SEQ ID NO: 3843 - RNA, 23 nt, Artificial Sequence
  source: /note="Description of Artificial Sequence: Synthetic oligonucleotide"
uuccuuuagaagauuauaaauca

SEQ ID NO: 3844 - RNA, 23 nt, Artificial Sequence
  source: /note="Description of Artificial Sequence: Synthetic oligonucleotide"
agcuguggauuuuacaaaccauu

SEQ ID NO: 3845 - RNA, 23 nt, Artificial Sequence
  source: /note="Description of Artificial Sequence: Synthetic oligonucleotide"
aagauuaauaccauccagcauca

SEQ ID NO: 3846 - RNA, 23 nt, Artificial Sequence
  source: /note="Description of Artificial Sequence: Synthetic oligonucleotide"
auguacacuacugauauaguuca

SEQ ID NO: 3847 - RNA, 23 nt, Artificial Sequence
  source: /note="Description of Artificial Sequence: Synthetic oligonucleotide"
uuucuaacuucaggaguugaugu

SEQ ID NO: 3848 - RNA, 23 nt, Artificial Sequence
  source: /note="Description of Artificial Sequence: Synthetic oligonucleotide"
uacaagauuaauaccauccagca

SEQ ID NO: 3849 - RNA, 23 nt, Artificial Sequence
  source: /note="Description of Artificial Sequence: Synthetic oligonucleotide"
agccuagacagugaaaugauaug

SEQ ID NO: 3850 - RNA, 23 nt, Artificial Sequence
  source: /note="Description of Artificial Sequence: Synthetic oligonucleotide"
ugauauagcuguggauuuuacaa

SEQ ID NO: 3851 - RNA, 23 nt, Artificial Sequence
  source: /note="Description of Artificial Sequence: Synthetic oligonucleotide"
aaaugcaaggaacacuaaggaag

SEQ ID NO: 3852 - RNA, 23 nt, Artificial Sequence
  source: /note="Description of Artificial Sequence: Synthetic oligonucleotide"
ucuagacagugaaaugauaugac

SEQ ID NO: 3853 - RNA, 23 nt, Artificial Sequence
  source: /note="Description of Artificial Sequence: Synthetic oligonucleotide"
uuaacuucaggaguugauguuuu

SEQ ID NO: 3854 - RNA, 23 nt, Artificial Sequence
  source: /note="Description of Artificial Sequence: Synthetic oligonucleotide"
uuaauaccauccagcaucaggau

SEQ ID NO: 3855 - RNA, 23 nt, Artificial Sequence
  source: /note="Description of Artificial Sequence: Synthetic oligonucleotide"
acuuggauaguugguugcauugu

SEQ ID NO: 3856 - RNA, 23 nt, Artificial Sequence
  source: /note="Description of Artificial Sequence: Synthetic oligonucleotide"
uaucauccuuuauuccguaaaga

SEQ ID NO: 3857 - RNA, 23 nt, Artificial Sequence
  source: /note="Description of Artificial Sequence: Synthetic oligonucleotide"
aaugcaaggaacacuaaggaaga

SEQ ID NO: 3858 - RNA, 23 nt, Artificial Sequence
  source: /note="Description of Artificial Sequence: Synthetic oligonucleotide"
uuuggauaguugguugcauuguu

SEQ ID NO: 3859 - RNA, 23 nt, Artificial Sequence
  source: /note="Description of Artificial Sequence: Synthetic oligonucleotide"
auuauacucucugccaaaucugc

SEQ ID NO: 3860 - RNA, 23 nt, Artificial Sequence
  source: /note="Description of Artificial Sequence: Synthetic oligonucleotide"
uacccuuaaucaugguggaaacu

SEQ ID NO: 3861 - RNA, 23 nt, Artificial Sequence
  source: /note="Description of Artificial Sequence: Synthetic oligonucleotide"
aacuauuucacacuaaccaguug

SEQ ID NO: 3862 - RNA, 23 nt, Artificial Sequence
  source: /note="Description of Artificial Sequence: Synthetic oligonucleotide"
agaguugccauauuggacuugga

SEQ ID NO: 3863 - RNA, 23 nt, Artificial Sequence
  source: /note="Description of Artificial Sequence: Synthetic oligonucleotide"
aagacccuuaaucaugguggaaa

SEQ ID NO: 3864 - RNA, 23 nt, Artificial Sequence
  source: /note="Description of Artificial Sequence: Synthetic oligonucleotide"
uuagccuagacagugaaaugaua

SEQ ID NO: 3865 - RNA, 23 nt, Artificial Sequence
  source: /note="Description of Artificial Sequence: Synthetic oligonucleotide"
acagaucagauaaaaaggacaac

SEQ ID NO: 3866 - RNA, 23 nt, Artificial Sequence
  source: /note="Description of Artificial Sequence: Synthetic oligonucleotide"
uauauuggauuuauacacuggau

SEQ ID NO: 3867 - RNA, 23 nt, Artificial Sequence
  source: /note="Description of Artificial Sequence: Synthetic oligonucleotide"
uuaguugguauaacacuuggaua

SEQ ID NO: 3868 - RNA, 23 nt, Artificial Sequence
  source: /note="Description of Artificial Sequence: Synthetic oligonucleotide"
uagagacaaucuuugguguucua

SEQ ID NO: 3869 - RNA, 23 nt, Artificial Sequence
  source: /note="Description of Artificial Sequence: Synthetic oligonucleotide"
ucagagacaaucuuugguguucu

SEQ ID NO: 3870 - RNA, 23 nt, Artificial Sequence
  source: /note="Description of Artificial Sequence: Synthetic oligonucleotide"
aucagauaaaaaggacaacaugc

SEQ ID NO: 3871 - RNA, 23 nt, Artificial Sequence
  source: /note="Description of Artificial Sequence: Synthetic oligonucleotide"
auuucuaacuucaggaguugaug

SEQ ID NO: 3872 - RNA, 23 nt, Artificial Sequence
  source: /note="Description of Artificial Sequence: Synthetic oligonucleotide"
ugguauaacacuuggauaguugg

SEQ ID NO: 3873 - RNA, 23 nt, Artificial Sequence
  source: /note="Description of Artificial Sequence: Synthetic oligonucleotide"
agacuacacaagauuaauaccau

SEQ ID NO: 3874 - RNA, 23 nt, Artificial Sequence
  source: /note="Description of Artificial Sequence: Synthetic oligonucleotide"
ugcauguucagugaaggagccag

SEQ ID NO: 3875 - RNA, 23 nt, Artificial Sequence
  source: /note="Description of Artificial Sequence: Synthetic oligonucleotide"
ugguaauguacacuacugauaua

SEQ ID NO: 3876 - RNA, 23 nt, Artificial Sequence
  source: /note="Description of Artificial Sequence: Synthetic oligonucleotide"
uguguucuaaggaaaaggcugcc

SEQ ID NO: 3877 - RNA, 23 nt, Artificial Sequence
  source: /note="Description of Artificial Sequence: Synthetic oligonucleotide"
uaacuauuucacacuaaccaguu

SEQ ID NO: 3878 - RNA, 23 nt, Artificial Sequence
  source: /note="Description of Artificial Sequence: Synthetic oligonucleotide"
aauguacacuacugauauaguuc

SEQ ID NO: 3879 - RNA, 23 nt, Artificial Sequence
  source: /note="Description of Artificial Sequence: Synthetic oligonucleotide"
uuaauguacacuacugauauagu

SEQ ID NO: 3880 - RNA, 23 nt, Artificial Sequence
  source: /note="Description of Artificial Sequence: Synthetic oligonucleotide"
uaguccaucuuaaaauauuacug

SEQ ID NO: 3881 - RNA, 23 nt, Artificial Sequence
  source: /note="Description of Artificial Sequence: Synthetic oligonucleotide"
uuuucccaguccaucuuaaaaua

SEQ ID NO: 3882 - RNA, 23 nt, Artificial Sequence
  source: /note="Description of Artificial Sequence: Synthetic oligonucleotide"
ugacuaggcauguucagugaagg

SEQ ID NO: 3883 - RNA, 23 nt, Artificial Sequence
  source: /note="Description of Artificial Sequence: Synthetic oligonucleotide"
uauaacacuuggauaguugguug

SEQ ID NO: 3884 - RNA, 23 nt, Artificial Sequence
  source: /note="Description of Artificial Sequence: Synthetic oligonucleotide"
uuuaguugguauaacacuuggau

SEQ ID NO: 3885 - RNA, 23 nt, Artificial Sequence
  source: /note="Description of Artificial Sequence: Synthetic oligonucleotide"
aguccaucuuaaaauauuacugc

SEQ ID NO: 3886 - RNA, 23 nt, Artificial Sequence
  source: /note="Description of Artificial Sequence: Synthetic oligonucleotide"
uaggauauagcuguggauuuuac

SEQ ID NO: 3887 - RNA, 23 nt, Artificial Sequence
  source: /note="Description of Artificial Sequence: Synthetic oligonucleotide"
uuaggcauguucagugaaggagc

SEQ ID NO: 3888 - RNA, 23 nt, Artificial Sequence
  source: /note="Description of Artificial Sequence: Synthetic oligonucleotide"
uuggacuaggcauguucagugaa

SEQ ID NO: 3889 - RNA, 23 nt, Artificial Sequence
  source: /note="Description of Artificial Sequence: Synthetic oligonucleotide"
guuuuaguugguauaacacuugg

SEQ ID NO: 3890 - RNA, 23 nt, Artificial Sequence
  source: /note="Description of Artificial Sequence: Synthetic oligonucleotide"
agacccuuaaucaugguggaaac

SEQ ID NO: 3891 - RNA, 23 nt, Artificial Sequence
  source: /note="Description of Artificial Sequence: Synthetic oligonucleotide"
aauguuggacuaggcauguucag

SEQ ID NO: 3892 - RNA, 23 nt, Artificial Sequence
  source: /note="Description of Artificial Sequence: Synthetic oligonucleotide"
augguaauguacacuacugauau

SEQ ID NO: 3893 - RNA, 23 nt, Artificial Sequence
  source: /note="Description of Artificial Sequence: Synthetic oligonucleotide"
uaguugguauaacacuuggauag

SEQ ID NO: 3894 - RNA, 23 nt, Artificial Sequence
  source: /note="Description of Artificial Sequence: Synthetic oligonucleotide"
uaguugccauauuggacuuggaa

SEQ ID NO: 3895 - RNA, 23 nt, Artificial Sequence
  source: /note="Description of Artificial Sequence: Synthetic oligonucleotide"
uguagccuagacagugaaaugau

SEQ ID NO: 3896 - RNA, 23 nt, Artificial Sequence
  source: /note="Description of Artificial Sequence: Synthetic oligonucleotide"
agcaucaggauauagcuguggau

SEQ ID NO: 3897 - RNA, 23 nt, Artificial Sequence
  source: /note="Description of Artificial Sequence: Synthetic oligonucleotide"
uacuaggcauguucagugaagga

SEQ ID NO: 3898 - RNA, 23 nt, Artificial Sequence
  source: /note="Description of Artificial Sequence: Synthetic oligonucleotide"
uucauaagcacucucaaccaccu

SEQ ID NO: 3899 - RNA, 23 nt, Artificial Sequence
  source: /note="Description of Artificial Sequence: Synthetic oligonucleotide"
uguaauguacacuacugauauag

SEQ ID NO: 3900 - RNA, 23 nt, Artificial Sequence
  source: /note="Description of Artificial Sequence: Synthetic oligonucleotide"
uaacacuuggauaguugguugca

SEQ ID NO: 3901 - RNA, 23 nt, Artificial Sequence
  source: /note="Description of Artificial Sequence: Synthetic oligonucleotide"
uauacucucugccaaaucugcua

SEQ ID NO: 3902 - RNA, 23 nt, Artificial Sequence
  source: /note="Description of Artificial Sequence: Synthetic oligonucleotide"
uaggcauguucagugaaggagcc

SEQ ID NO: 3903 - RNA, 23 nt, Artificial Sequence
  source: /note="Description of Artificial Sequence: Synthetic oligonucleotide"
aaaaauguuggacuaggcauguu

SEQ ID NO: 3904 - RNA, 23 nt, Artificial Sequence
  source: /note="Description of Artificial Sequence: Synthetic oligonucleotide"
uucauuaagauacugauggcaca

SEQ ID NO: 3905 - RNA, 23 nt, Artificial Sequence
  source: /note="Description of Artificial Sequence: Synthetic oligonucleotide"
uuucauuaagauacugauggcac

SEQ ID NO: 3906 - RNA, 23 nt, Artificial Sequence
  source: /note="Description of Artificial Sequence: Synthetic oligonucleotide"
agacaaucuuugguguucuaagg

SEQ ID NO: 3907 - RNA, 23 nt, Artificial Sequence
  source: /note="Description of Artificial Sequence: Synthetic oligonucleotide"
uagccuagacagugaaaugauau

SEQ ID NO: 3908 - RNA, 23 nt, Artificial Sequence
  source: /note="Description of Artificial Sequence: Synthetic oligonucleotide"
uuguuguagccuagacagugaaa

SEQ ID NO: 3909 - RNA, 23 nt, Artificial Sequence
  source: /note="Description of Artificial Sequence: Synthetic oligonucleotide"
uguauaacacuuggauaguuggu

SEQ ID NO: 3910 - RNA, 23 nt, Artificial Sequence
  source: /note="Description of Artificial Sequence: Synthetic oligonucleotide"
ucauauuggacuuggaaccaaaa

SEQ ID NO: 3911 - RNA, 23 nt, Artificial Sequence
  source: /note="Description of Artificial Sequence: Synthetic oligonucleotide"
aguuugaucaccucauaagcacu

SEQ ID NO: 3912 - RNA, 23 nt, Artificial Sequence
  source: /note="Description of Artificial Sequence: Synthetic oligonucleotide"
ucaccuucacaaggucugagauu

SEQ ID NO: 3913 - RNA, 23 nt, Artificial Sequence
  source: /note="Description of Artificial Sequence: Synthetic oligonucleotide"
aggauauagcuguggauuuuaca

SEQ ID NO: 3914 - RNA, 23 nt, Artificial Sequence
  source: /note="Description of Artificial Sequence: Synthetic oligonucleotide"
acuaggcauguucagugaaggag

SEQ ID NO: 3915 - RNA, 23 nt, Artificial Sequence
  source: /note="Description of Artificial Sequence: Synthetic oligonucleotide"
uggauuuauacacuggaucccag

SEQ ID NO: 3916 - RNA, 23 nt, Artificial Sequence
  source: /note="Description of Artificial Sequence: Synthetic oligonucleotide"
uucacuguucaagguuuauuggg

SEQ ID NO: 3917 - RNA, 23 nt, Artificial Sequence
  source: /note="Description of Artificial Sequence: Synthetic oligonucleotide"
aagauacugauggcacaggccau

SEQ ID NO: 3918 - RNA, 23 nt, Artificial Sequence
  source: /note="Description of Artificial Sequence: Synthetic oligonucleotide"
ugucuucgaugacaucaacaaga

SEQ ID NO: 3919 - RNA, 23 nt, Artificial Sequence
  source: /note="Description of Artificial Sequence: Synthetic oligonucleotide"
auuauacucucugccaaaucugc

SEQ ID NO: 3920 - RNA, 23 nt, Artificial Sequence
  source: /note="Description of Artificial Sequence: Synthetic oligonucleotide"
uacccuuaaucaugguggaaacu

SEQ ID NO: 3921 - RNA, 23 nt, Artificial Sequence
  source: /note="Description of Artificial Sequence: Synthetic oligonucleotide"
uagaauccuguuguagccuagac

SEQ ID NO: 3922 - RNA, 23 nt, Artificial Sequence
  source: /note="Description of Artificial Sequence: Synthetic oligonucleotide"
ugacaacaugcacaaccuccacc

SEQ ID NO: 3923 - RNA, 23 nt, Artificial Sequence
  source: /note="Description of Artificial Sequence: Synthetic oligonucleotide"
aggcauguucagugaaggagcca

SEQ ID NO: 3924 - RNA, 23 nt, Artificial Sequence
  source: /note="Description of Artificial Sequence: Synthetic oligonucleotide"
uauuggacuuggaaccaaaagga

SEQ ID NO: 3925 - RNA, 23 nt, Artificial Sequence
  source: /note="Description of Artificial Sequence: Synthetic oligonucleotide"
uaagauacugauggcacaggcca

SEQ ID NO: 3926 - RNA, 23 nt, Artificial Sequence
  source: /note="Description of Artificial Sequence: Synthetic oligonucleotide"
uaguuugaucaccucauaagcac

SEQ ID NO: 3927 - RNA, 23 nt, Artificial Sequence
  source: /note="Description of Artificial Sequence: Synthetic oligonucleotide"
ugaguuugaucaccucauaagca

SEQ ID NO: 3928 - RNA, 23 nt, Artificial Sequence
  source: /note="Description of Artificial Sequence: Synthetic oligonucleotide"
auucugucccaaaaugcaaggaa

SEQ ID NO: 3929 - RNA, 23 nt, Artificial Sequence
  source: /note="Description of Artificial Sequence: Synthetic oligonucleotide"
ugccauauuggacuuggaaccaa

SEQ ID NO: 3930 - RNA, 23 nt, Artificial Sequence
  source: /note="Description of Artificial Sequence: Synthetic oligonucleotide"
ucuguuguagccuagacagugaa

SEQ ID NO: 3931 - RNA, 23 nt, Artificial Sequence
  source: /note="Description of Artificial Sequence: Synthetic oligonucleotide"
uccuguuguagccuagacaguga

SEQ ID NO: 3932 - RNA, 23 nt, Artificial Sequence
  source: /note="Description of Artificial Sequence: Synthetic oligonucleotide"
uccaacaacuguaaucuuauucu

SEQ ID NO: 3933 - RNA, 23 nt, Artificial Sequence
  source: /note="Description of Artificial Sequence: Synthetic oligonucleotide"
uaccucauaagcacucucaacca

SEQ ID NO: 3934 - RNA, 23 nt, Artificial Sequence
  source: /note="Description of Artificial Sequence: Synthetic oligonucleotide"
uaauccuguuguagccuagacag

SEQ ID NO: 3935 - RNA, 23 nt, Artificial Sequence
  source: /note="Description of Artificial Sequence: Synthetic oligonucleotide"
agaauccuguuguagccuagaca

SEQ ID NO: 3936 - RNA, 23 nt, Artificial Sequence
  source: /note="Description of Artificial Sequence: Synthetic oligonucleotide"
uacaacaugcacaaccuccaccu

SEQ ID NO: 3937 - RNA, 23 nt, Artificial Sequence
  source: /note="Description of Artificial Sequence: Synthetic oligonucleotide"
ucuuugaguuugaucaccucaua

SEQ ID NO: 3938 - RNA, 23 nt, Artificial Sequence
  source: /note="Description of Artificial Sequence: Synthetic oligonucleotide"
uuagccuuugaguuugaucaccu

SEQ ID NO: 3939 - RNA, 23 nt, Artificial Sequence
  source: /note="Description of Artificial Sequence: Synthetic oligonucleotide"
uucaaacgggccucuuccucaga

SEQ ID NO: 3940 - RNA, 23 nt, Artificial Sequence
  source: /note="Description of Artificial Sequence: Synthetic oligonucleotide"
uacucucaaccaccugcuuguga

SEQ ID NO: 3941 - RNA, 23 nt, Artificial Sequence
  source: /note="Description of Artificial Sequence: Synthetic oligonucleotide"
uuauacucucugccaaaucugcu

SEQ ID NO: 3942 - RNA, 23 nt, Artificial Sequence
  source: /note="Description of Artificial Sequence: Synthetic oligonucleotide"
guuugaucaccucauaagcacuc

SEQ ID NO: 3943 - RNA, 23 nt, Artificial Sequence
  source: /note="Description of Artificial Sequence: Synthetic oligonucleotide"
auacucucugccaaaucugcuac

SEQ ID NO: 3944 - RNA, 23 nt, Artificial Sequence
  source: /note="Description of Artificial Sequence: Synthetic oligonucleotide"
ucauuauacucucugccaaaucu

SEQ ID NO: 3945 - RNA, 23 nt, Artificial Sequence
  source: /note="Description of Artificial Sequence: Synthetic oligonucleotide"
uucauuauacucucugccaaauc

SEQ ID NO: 3946 - RNA, 23 nt, Artificial Sequence
  source: /note="Description of Artificial Sequence: Synthetic oligonucleotide"
uauucugucccaaaaugcaagga

SEQ ID NO: 3947 - RNA, 23 nt, Artificial Sequence
  source: /note="Description of Artificial Sequence: Synthetic oligonucleotide"
ucacaaggucugagauuccauuc

SEQ ID NO: 3948 - RNA, 23 nt, Artificial Sequence
  source: /note="Description of Artificial Sequence: Synthetic oligonucleotide"
uagcaucaggauauagcugugga

SEQ ID NO: 3949 - RNA, 23 nt, Artificial Sequence
  source: /note="Description of Artificial Sequence: Synthetic oligonucleotide"
uuucaaacgggccucuuccucag

SEQ ID NO: 3950 - RNA, 23 nt, Artificial Sequence
  source: /note="Description of Artificial Sequence: Synthetic oligonucleotide"
uaaacgggccucuuccucagaag

SEQ ID NO: 3951 - RNA, 23 nt, Artificial Sequence
  source: /note="Description of Artificial Sequence: Synthetic oligonucleotide"
uacacuggaucccaggaugugac

SEQ ID NO: 3952 - RNA, 23 nt, Artificial Sequence
  source: /note="Description of Artificial Sequence: Synthetic oligonucleotide"
ugguguucuaaggaaaaggcugc

SEQ ID NO: 3953 - RNA, 23 nt, Artificial Sequence
  source: /note="Description of Artificial Sequence: Synthetic oligonucleotide"
uauuucacacuaaccaguugaag

SEQ ID NO: 3954 - RNA, 23 nt, Artificial Sequence
  source: /note="Description of Artificial Sequence: Synthetic oligonucleotide"
uuuuuaucugaucugugauuaaa

SEQ ID NO: 3955 - RNA, 23 nt, Artificial Sequence
  source: /note="Description of Artificial Sequence: Synthetic oligonucleotide"
caacugguuagugugaaauaguu

SEQ ID NO: 3956 - RNA, 23 nt, Artificial Sequence
  source: /note="Description of Artificial Sequence: Synthetic oligonucleotide"
ugaacaugccuaguccaacauuu

SEQ ID NO: 3957 - RNA, 23 nt, Artificial Sequence
  source: /note="Description of Artificial Sequence: Synthetic oligonucleotide"
uccaaguccaauauggcaacucu

SEQ ID NO: 3958 - RNA, 23 nt, Artificial Sequence
  source: /note="Description of Artificial Sequence: Synthetic oligonucleotide"
uuuccaccaugauuaagggucuu

SEQ ID NO: 3959 - RNA, 23 nt, Artificial Sequence
  source: /note="Description of Artificial Sequence: Synthetic oligonucleotide"
uaucauuucacugucuaggcuac

SEQ ID NO: 3960 - RNA, 23 nt, Artificial Sequence
  source: /note="Description of Artificial Sequence: Synthetic oligonucleotide"
guuguccuuuuuaucugaucugu

SEQ ID NO: 3961 - RNA, 23 nt, Artificial Sequence
  source: /note="Description of Artificial Sequence: Synthetic oligonucleotide"
auccaguguauaaauccaauauc

SEQ ID NO: 3962 - RNA, 23 nt, Artificial Sequence
  source: /note="Description of Artificial Sequence: Synthetic oligonucleotide"
uauccaaguguuauaccaacuaa

SEQ ID NO: 3963 - RNA, 23 nt, Artificial Sequence
  source: /note="Description of Artificial Sequence: Synthetic oligonucleotide"
augucaucgaagacaaauugaag

SEQ ID NO: 3964 - RNA, 23 nt, Artificial Sequence
  source: /note="Description of Artificial Sequence: Synthetic oligonucleotide"
uagaacaccaaagauugucucug

SEQ ID NO: 3965 - RNA, 23 nt, Artificial Sequence
  source: /note="Description of Artificial Sequence: Synthetic oligonucleotide"
agaacaccaaagauugucucugg

SEQ ID NO: 3966 - RNA, 23 nt, Artificial Sequence
  source: /note="Description of Artificial Sequence: Synthetic oligonucleotide"
gcauguuguccuuuuuaucugau

SEQ ID NO: 3967 - RNA, 23 nt, Artificial Sequence
  source: /note="Description of Artificial Sequence: Synthetic oligonucleotide"
caucaacuccugaaguuagaaau

SEQ ID NO: 3968 - RNA, 23 nt, Artificial Sequence
  source: /note="Description of Artificial Sequence: Synthetic oligonucleotide"
ccaacuauccaaguguuauacca

SEQ ID NO: 3969 - RNA, 23 nt, Artificial Sequence
  source: /note="Description of Artificial Sequence: Synthetic oligonucleotide"
uuuccuuagaacaccaaagauug

SEQ ID NO: 3970 - RNA, 23 nt, Artificial Sequence
  source: /note="Description of Artificial Sequence: Synthetic oligonucleotide"
augguauuaaucuuguguagucu

SEQ ID NO: 3971 - RNA, 23 nt, Artificial Sequence
  source: /note="Description of Artificial Sequence: Synthetic oligonucleotide"
cuggcuccuucacugaacaugcc

SEQ ID NO: 3972 - RNA, 23 nt, Artificial Sequence
  source: /note="Description of Artificial Sequence: Synthetic oligonucleotide"
uauaucaguaguguacauuacca

SEQ ID NO: 3973 - RNA, 23 nt, Artificial Sequence
  source: /note="Description of Artificial Sequence: Synthetic oligonucleotide"
ggcagccuuuuccuuagaacacc

SEQ ID NO: 3974 - RNA, 23 nt, Artificial Sequence
  source: /note="Description of Artificial Sequence: Synthetic oligonucleotide"
aacugguuagugugaaauaguuc

SEQ ID NO: 3975 - RNA, 23 nt, Artificial Sequence
  source: /note="Description of Artificial Sequence: Synthetic oligonucleotide"
gaacuauaucaguaguguacauu

SEQ ID NO: 3976 - RNA, 23 nt, Artificial Sequence
  source: /note="Description of Artificial Sequence: Synthetic oligonucleotide"
acuauaucaguaguguacauuac

SEQ ID NO: 3977 - RNA, 23 nt, Artificial Sequence
  source: /note="Description of Artificial Sequence: Synthetic oligonucleotide"
caguaauauuuuaagauggacug

SEQ ID NO: 3978 - RNA, 23 nt, Artificial Sequence
  source: /note="Description of Artificial Sequence: Synthetic oligonucleotide"
uauuuuaagauggacugggaaaa

SEQ ID NO: 3979 - RNA, 23 nt, Artificial Sequence
  source: /note="Description of Artificial Sequence: Synthetic oligonucleotide"
acugguuagugugaaauaguucu

SEQ ID NO: 3980 - RNA, 23 nt, Artificial Sequence
  source: /note="Description of Artificial Sequence: Synthetic oligonucleotide"
ccuucacugaacaugccuagucc

SEQ ID NO: 3981 - RNA, 23 nt, Artificial Sequence
  source: /note="Description of Artificial Sequence: Synthetic oligonucleotide"
caaccaacuauccaaguguuaua

SEQ ID NO: 3982 - RNA, 23 nt, Artificial Sequence
  source: /note="Description of Artificial Sequence: Synthetic oligonucleotide"
auccaaguguuauaccaacuaaa

SEQ ID NO: 3983 - RNA, 23 nt, Artificial Sequence
  source: /note="Description of Artificial Sequence: Synthetic oligonucleotide"
gauuccuuuugguuccaagucca

SEQ ID NO: 3984 - RNA, 23 nt, Artificial Sequence
  source: /note="Description of Artificial Sequence: Synthetic oligonucleotide"
uggcagccuuuuccuuagaacac

SEQ ID NO: 3985 - RNA, 23 nt, Artificial Sequence
  source: /note="Description of Artificial Sequence: Synthetic oligonucleotide"
gcaguaauauuuuaagauggacu

SEQ ID NO: 3986 - RNA, 23 nt, Artificial Sequence
  source: /note="Description of Artificial Sequence: Synthetic oligonucleotide"
guaaaauccacagcuauauccug

SEQ ID NO: 3987 - RNA, 23 nt, Artificial Sequence
  source: /note="Description of Artificial Sequence: Synthetic oligonucleotide"
gcuccuucacugaacaugccuag

SEQ ID NO: 3988 - RNA, 23 nt, Artificial Sequence
  source: /note="Description of Artificial Sequence: Synthetic oligonucleotide"
uucacugaacaugccuaguccaa

SEQ ID NO: 3989 - RNA, 23 nt, Artificial Sequence
  source: /note="Description of Artificial Sequence: Synthetic oligonucleotide"
ccaaguguuauaccaacuaaaac

SEQ ID NO: 3990 - RNA, 23 nt, Artificial Sequence
  source: /note="Description of Artificial Sequence: Synthetic oligonucleotide"
guuuccaccaugauuaagggucu

SEQ ID NO: 3991 - RNA, 23 nt, Artificial Sequence
  source: /note="Description of Artificial Sequence: Synthetic oligonucleotide"
cugaacaugccuaguccaacauu

SEQ ID NO: 3992 - RNA, 23 nt, Artificial Sequence
  source: /note="Description of Artificial Sequence: Synthetic oligonucleotide"
auaucaguaguguacauuaccau

SEQ ID NO: 3993 - RNA, 23 nt, Artificial Sequence
  source: /note="Description of Artificial Sequence: Synthetic oligonucleotide"
cuauccaaguguuauaccaacua

SEQ ID NO: 3994 - RNA, 23 nt, Artificial Sequence
  source: /note="Description of Artificial Sequence: Synthetic oligonucleotide"
uuccaaguccaauauggcaacuc

SEQ ID NO: 3995 - RNA, 23 nt, Artificial Sequence
  source: /note="Description of Artificial Sequence: Synthetic oligonucleotide"
gaaucucagaccuugugaaggug

SEQ ID NO: 3996 - RNA, 23 nt, Artificial Sequence
  source: /note="Description of Artificial Sequence: Synthetic oligonucleotide"
aucauuucacugucuaggcuaca

SEQ ID NO: 3997 - RNA, 23 nt, Artificial Sequence
  source: /note="Description of Artificial Sequence: Synthetic oligonucleotide"
auccacagcuauauccugaugcu

SEQ ID NO: 3998 - RNA, 23 nt, Artificial Sequence
  source: /note="Description of Artificial Sequence: Synthetic oligonucleotide"
uccuucacugaacaugccuaguc

SEQ ID NO: 3999 - RNA, 23 nt, Artificial Sequence
  source: /note="Description of Artificial Sequence: Synthetic oligonucleotide"
aggugguugagagugcuuaugag

SEQ ID NO: 4000 - RNA, 23 nt, Artificial Sequence
  source: /note="Description of Artificial Sequence: Synthetic oligonucleotide"
aucaaacucaaaggcuacacauc

SEQ ID NO: 4001 - RNA, 23 nt, Artificial Sequence
  source: /note="Description of Artificial Sequence: Synthetic oligonucleotide"
cuauaucaguaguguacauuacc

SEQ ID NO: 4002 - RNA, 23 nt, Artificial Sequence
  source: /note="Description of Artificial Sequence: Synthetic oligonucleotide"
ugcaaccaacuauccaaguguua

SEQ ID NO: 4003 - RNA, 23 nt, Artificial Sequence
  source: /note="Description of Artificial Sequence: Synthetic oligonucleotide"
ugucaucgaagacaaauugaagg

SEQ ID NO: 4004 - RNA, 23 nt, Artificial Sequence
  source: /note="Description of Artificial Sequence: Synthetic oligonucleotide"
uagcagauuuggcagagaguaua

SEQ ID NO: 4005 - RNA, 23 nt, Artificial Sequence
  source: /note="Description of Artificial Sequence: Synthetic oligonucleotide"
ggcuccuucacugaacaugccua

SEQ ID NO: 4006 - RNA, 23 nt, Artificial Sequence
  source: /note="Description of Artificial Sequence: Synthetic oligonucleotide"
aacaugccuaguccaacauuuuu

SEQ ID NO: 4007 - RNA, 23 nt, Artificial Sequence
  source: /note="Description of Artificial Sequence: Synthetic oligonucleotide"
ugugccaucaguaucuuaaugaa

SEQ ID NO: 4008 - RNA, 23 nt, Artificial Sequence
  source: /note="Description of Artificial Sequence: Synthetic oligonucleotide"
gugccaucaguaucuuaaugaag

SEQ ID NO: 4009 - RNA, 23 nt, Artificial Sequence
  source: /note="Description of Artificial Sequence: Synthetic oligonucleotide"
ccuuagaacaccaaagauugucu

SEQ ID NO: 4010 - RNA, 23 nt, Artificial Sequence
  source: /note="Description of Artificial Sequence: Synthetic oligonucleotide"
auaucauuucacugucuaggcua

SEQ ID NO: 4011 - RNA, 23 nt, Artificial Sequence
  source: /note="Description of Artificial Sequence: Synthetic oligonucleotide"
uuucacugucuaggcuacaacag

SEQ ID NO: 4012 - RNA, 23 nt, Artificial Sequence
  source: /note="Description of Artificial Sequence: Synthetic oligonucleotide"
ugggauccaguguauaaauccaa

SEQ ID NO: 4013 - RNA, 23 nt, Artificial Sequence
  source: /note="Description of Artificial Sequence: Synthetic oligonucleotide"
accaacuauccaaguguuauacc

SEQ ID NO: 4014 - RNA, 23 nt, Artificial Sequence
  source: /note="Description of Artificial Sequence: Synthetic oligonucleotide"
uuuugguuccaaguccaauaugg

SEQ ID NO: 4015 - RNA, 23 nt, Artificial Sequence
  source: /note="Description of Artificial Sequence: Synthetic oligonucleotide"
agugcuuaugaggugaucaaacu

SEQ ID NO: 4016 - RNA, 23 nt, Artificial Sequence
  source: /note="Description of Artificial Sequence: Synthetic oligonucleotide"
ucaaacucaaaggcuacacaucc

SEQ ID NO: 4017 - RNA, 23 nt, Artificial Sequence
  source: /note="Description of Artificial Sequence: Synthetic oligonucleotide"
aaucucagaccuugugaagguga

SEQ ID NO: 4018 - RNA, 23 nt, Artificial Sequence
  source: /note="Description of Artificial Sequence: Synthetic oligonucleotide"
uguaaaauccacagcuauauccu

SEQ ID NO: 4019 - RNA, 23 nt, Artificial Sequence
  source: /note="Description of Artificial Sequence: Synthetic oligonucleotide"
cuccuucacugaacaugccuagu

SEQ ID NO: 4020 - RNA, 23 nt, Artificial Sequence
  source: /note="Description of Artificial Sequence: Synthetic oligonucleotide"
cugggauccaguguauaaaucca

SEQ ID NO: 4021 - RNA, 23 nt, Artificial Sequence
  source: /note="Description of Artificial Sequence: Synthetic oligonucleotide"
cccaauaaaccuugaacagugac

SEQ ID NO: 4022 - RNA, 23 nt, Artificial Sequence
  source: /note="Description of Artificial Sequence: Synthetic oligonucleotide"
auggccugugccaucaguaucuu

SEQ ID NO: 4023 - RNA, 23 nt, Artificial Sequence
  source: /note="Description of Artificial Sequence: Synthetic oligonucleotide"
ucuuguugaugucaucgaagaca

SEQ ID NO: 4024 - RNA, 23 nt, Artificial Sequence
  source: /note="Description of Artificial Sequence: Synthetic oligonucleotide"
aaggaucuuauuuugugaacuau

SEQ ID NO: 4025 - RNA, 23 nt, Artificial Sequence
  source: /note="Description of Artificial Sequence: Synthetic oligonucleotide"
caaaggaucuuauuuugugaacu

SEQ ID NO: 4026 - RNA, 23 nt, Artificial Sequence
  source: /note="Description of Artificial Sequence: Synthetic oligonucleotide"
auaucaugucuugugcauaauuc

SEQ ID NO: 4027 - RNA, 23 nt, Artificial Sequence
  source: /note="Description of Artificial Sequence: Synthetic oligonucleotide"
gaugucauaucauuucacugucu

SEQ ID NO: 4028 - RNA, 23 nt, Artificial Sequence
  source: /note="Description of Artificial Sequence: Synthetic oligonucleotide"
ugucauaucauuucacugucuag

SEQ ID NO: 4029 - RNA, 23 nt, Artificial Sequence
  source: /note="Description of Artificial Sequence: Synthetic oligonucleotide"
ugauuuauaaucuucuaaaggaa

SEQ ID NO: 4030 - RNA, 23 nt, Artificial Sequence
  source: /note="Description of Artificial Sequence: Synthetic oligonucleotide"
aaugguuuguaaaauccacagcu

SEQ ID NO: 4031 - RNA, 23 nt, Artificial Sequence
  source: /note="Description of Artificial Sequence: Synthetic oligonucleotide"
ugaugcuggaugguauuaaucuu

SEQ ID NO: 4032 - RNA, 23 nt, Artificial Sequence
  source: /note="Description of Artificial Sequence: Synthetic oligonucleotide"
ugaacuauaucaguaguguacau

SEQ ID NO: 4033 - RNA, 23 nt, Artificial Sequence
  source: /note="Description of Artificial Sequence: Synthetic oligonucleotide"
acaucaacuccugaaguuagaaa

SEQ ID NO: 4034 - RNA, 23 nt, Artificial Sequence
  source: /note="Description of Artificial Sequence: Synthetic oligonucleotide"
ugcuggaugguauuaaucuugug

SEQ ID NO: 4035 - RNA, 23 nt, Artificial Sequence
  source: /note="Description of Artificial Sequence: Synthetic oligonucleotide"
cauaucauuucacugucuaggcu

SEQ ID NO: 4036 - RNA, 23 nt, Artificial Sequence
  source: /note="Description of Artificial Sequence: Synthetic oligonucleotide"
uuguaaaauccacagcuauaucc

SEQ ID NO: 4037 - RNA, 23 nt, Artificial Sequence
  source: /note="Description of Artificial Sequence: Synthetic oligonucleotide"
cuuccuuaguguuccuugcauuu

SEQ ID NO: 4038 - RNA, 23 nt, Artificial Sequence
  source: /note="Description of Artificial Sequence: Synthetic oligonucleotide"
gucauaucauuucacugucuagg

SEQ ID NO: 4039 - RNA, 23 nt, Artificial Sequence
  source: /note="Description of Artificial Sequence: Synthetic oligonucleotide"
aaaacaucaacuccugaaguuag

SEQ ID NO: 4040 - RNA, 23 nt, Artificial Sequence
  source: /note="Description of Artificial Sequence: Synthetic oligonucleotide"
auccugaugcuggaugguauuaa

SEQ ID NO: 4041 - RNA, 23 nt, Artificial Sequence
  source: /note="Description of Artificial Sequence: Synthetic oligonucleotide"
acaaugcaaccaacuauccaagu

SEQ ID NO: 4042 - RNA, 23 nt, Artificial Sequence
  source: /note="Description of Artificial Sequence: Synthetic oligonucleotide"
ucuuuacggaauaaaggaugaug

SEQ ID NO: 4043 - RNA, 23 nt, Artificial Sequence
  source: /note="Description of Artificial Sequence: Synthetic oligonucleotide"
ucuuccuuaguguuccuugcauu

SEQ ID NO: 4044 - RNA, 23 nt, Artificial Sequence
  source: /note="Description of Artificial Sequence: Synthetic oligonucleotide"
aacaaugcaaccaacuauccaag

SEQ ID NO: 4045 - RNA, 23 nt, Artificial Sequence
  source: /note="Description of Artificial Sequence: Synthetic oligonucleotide"
gcagauuuggcagagaguauaau

SEQ ID NO: 4046 - RNA, 23 nt, Artificial Sequence
  source: /note="Description of Artificial Sequence: Synthetic oligonucleotide"
aguuuccaccaugauuaaggguc

SEQ ID NO: 4047 - RNA, 23 nt, Artificial Sequence
  source: /note="Description of Artificial Sequence: Synthetic oligonucleotide"
caacugguuagugugaaauaguu

SEQ ID NO: 4048 - RNA, 23 nt, Artificial Sequence
  source: /note="Description of Artificial Sequence: Synthetic oligonucleotide"
uccaaguccaauauggcaacucu

SEQ ID NO: 4049 - RNA, 23 nt, Artificial Sequence
  source: /note="Description of Artificial Sequence: Synthetic oligonucleotide"
uuuccaccaugauuaagggucuu

SEQ ID NO: 4050 - RNA, 23 nt, Artificial Sequence
  source: /note="Description of Artificial Sequence: Synthetic oligonucleotide"
uaucauuucacugucuaggcuac

SEQ ID NO: 4051 - RNA, 23 nt, Artificial Sequence
  source: /note="Description of Artificial Sequence: Synthetic oligonucleotide"
guuguccuuuuuaucugaucugu

SEQ ID NO: 4052 - RNA, 23 nt, Artificial Sequence
  source: /note="Description of Artificial Sequence: Synthetic oligonucleotide"
auccaguguauaaauccaauauc

SEQ ID NO: 4053 - RNA, 23 nt, Artificial Sequence
  source: /note="Description of Artificial Sequence: Synthetic oligonucleotide"
uauccaaguguuauaccaacuaa

SEQ ID NO: 4054 - RNA, 23 nt, Artificial Sequence
  source: /note="Description of Artificial Sequence: Synthetic oligonucleotide"
uagaacaccaaagauugucucug

SEQ ID NO: 4055 - RNA, 23 nt, Artificial Sequence
  source: /note="Description of Artificial Sequence: Synthetic oligonucleotide"
agaacaccaaagauugucucugg

SEQ ID NO: 4056 - RNA, 23 nt, Artificial Sequence
  source: /note="Description of Artificial Sequence: Synthetic oligonucleotide"
gcauguuguccuuuuuaucugau

SEQ ID NO: 4057 - RNA, 23 nt, Artificial Sequence
  source: /note="Description of Artificial Sequence: Synthetic oligonucleotide"
caucaacuccugaaguuagaaau

SEQ ID NO: 4058 - RNA, 23 nt, Artificial Sequence
  source: /note="Description of Artificial Sequence: Synthetic oligonucleotide"
ccaacuauccaaguguuauacca

SEQ ID NO: 4059 - RNA, 23 nt, Artificial Sequence
  source: /note="Description of Artificial Sequence: Synthetic oligonucleotide"
augguauuaaucuuguguagucu

SEQ ID NO: 4060 - RNA, 23 nt, Artificial Sequence
  source: /note="Description of Artificial Sequence: Synthetic oligonucleotide"
cuggcuccuucacugaacaugcc

SEQ ID NO: 4061 - RNA, 23 nt, Artificial Sequence
  source: /note="Description of Artificial Sequence: Synthetic oligonucleotide"
uauaucaguaguguacauuacca

SEQ ID NO: 4062 - RNA, 23 nt, Artificial Sequence
  source: /note="Description of Artificial Sequence: Synthetic oligonucleotide"
ggcagccuuuuccuuagaacacc

SEQ ID NO: 4063 - RNA, 23 nt, Artificial Sequence
  source: /note="Description of Artificial Sequence: Synthetic oligonucleotide"
aacugguuagugugaaauaguuc

SEQ ID NO: 4064 - RNA, 23 nt, Artificial Sequence
  source: /note="Description of Artificial Sequence: Synthetic oligonucleotide"
gaacuauaucaguaguguacauu

SEQ ID NO: 4065 - RNA, 23 nt, Artificial Sequence
  source: /note="Description of Artificial Sequence: Synthetic oligonucleotide"
acuauaucaguaguguacauuac

SEQ ID NO: 4066 - RNA, 23 nt, Artificial Sequence
  source: /note="Description of Artificial Sequence: Synthetic oligonucleotide"
caguaauauuuuaagauggacug

SEQ ID NO: 4067 - RNA, 23 nt, Artificial Sequence
  source: /note="Description of Artificial Sequence: Synthetic oligonucleotide"
uauuuuaagauggacugggaaaa

SEQ ID NO: 4068 - RNA, 23 nt, Artificial Sequence
  source: /note="Description of Artificial Sequence: Synthetic oligonucleotide"
ccuucacugaacaugccuagucc

SEQ ID NO: 4069 - RNA, 23 nt, Artificial Sequence
  source: /note="Description of Artificial Sequence: Synthetic oligonucleotide"
caaccaacuauccaaguguuaua

SEQ ID NO: 4070 - RNA, 23 nt, Artificial Sequence
  source: /note="Description of Artificial Sequence: Synthetic oligonucleotide"
auccaaguguuauaccaacuaaa

SEQ ID NO: 4071 - RNA, 23 nt, Artificial Sequence
  source: /note="Description of Artificial Sequence: Synthetic oligonucleotide"
gcaguaauauuuuaagauggacu

SEQ ID NO: 4072 - RNA, 23 nt, Artificial Sequence
  source: /note="Description of Artificial Sequence: Synthetic oligonucleotide"
guaaaauccacagcuauauccug

SEQ ID NO: 4073 - RNA, 23 nt, Artificial Sequence
  source: /note="Description of Artificial Sequence: Synthetic oligonucleotide"
gcuccuucacugaacaugccuag

SEQ ID NO: 4074 - RNA, 23 nt, Artificial Sequence
  source: /note="Description of Artificial Sequence: Synthetic oligonucleotide"
uucacugaacaugccuaguccaa

SEQ ID NO: 4075 - RNA, 23 nt, Artificial Sequence
  source: /note="Description of Artificial Sequence: Synthetic oligonucleotide"
ccaaguguuauaccaacuaaaac

SEQ ID NO: 4076 - RNA, 23 nt, Artificial Sequence
  source: /note="Description of Artificial Sequence: Synthetic oligonucleotide"
guuuccaccaugauuaagggucu

SEQ ID NO: 4077 - RNA, 23 nt, Artificial Sequence
  source: /note="Description of Artificial Sequence: Synthetic oligonucleotide"
cugaacaugccuaguccaacauu

SEQ ID NO: 4078 - RNA, 23 nt, Artificial Sequence
  source: /note="Description of Artificial Sequence: Synthetic oligonucleotide"
auaucaguaguguacauuaccau

SEQ ID NO: 4079 - RNA, 23 nt, Artificial Sequence
  source: /note="Description of Artificial Sequence: Synthetic oligonucleotide"
cuauccaaguguuauaccaacua

SEQ ID NO: 4080 - RNA, 23 nt, Artificial Sequence
  source: /note="Description of Artificial Sequence: Synthetic oligonucleotide"
uuccaaguccaauauggcaacuc

SEQ ID NO: 4081 - RNA, 23 nt, Artificial Sequence
  source: /note="Description of Artificial Sequence: Synthetic oligonucleotide"
aucauuucacugucuaggcuaca

SEQ ID NO: 4082 - RNA, 23 nt, Artificial Sequence
  source: /note="Description of Artificial Sequence: Synthetic oligonucleotide"
auccacagcuauauccugaugcu

SEQ ID NO: 4083 - RNA, 23 nt, Artificial Sequence
  source: /note="Description of Artificial Sequence: Synthetic oligonucleotide"
uccuucacugaacaugccuaguc

SEQ ID NO: 4084 - RNA, 23 nt, Artificial Sequence
  source: /note="Description of Artificial Sequence: Synthetic oligonucleotide"
aggugguugagagugcuuaugag

SEQ ID NO: 4085 - RNA, 23 nt, Artificial Sequence
  source: /note="Description of Artificial Sequence: Synthetic oligonucleotide"
cuauaucaguaguguacauuacc

SEQ ID NO: 4086 - RNA, 23 nt, Artificial Sequence
  source: /note="Description of Artificial Sequence: Synthetic oligonucleotide"
ugcaaccaacuauccaaguguua

SEQ ID NO: 4087 - RNA, 23 nt, Artificial Sequence
  source: /note="Description of Artificial Sequence: Synthetic oligonucleotide"
uagcagauuuggcagagaguaua

SEQ ID NO: 4088 - RNA, 23 nt, Artificial Sequence
  source: /note="Description of Artificial Sequence: Synthetic oligonucleotide"
ggcuccuucacugaacaugccua

SEQ ID NO: 4089 - RNA, 23 nt, Artificial Sequence
  source: /note="Description of Artificial Sequence: Synthetic oligonucleotide"
aacaugccuaguccaacauuuuu

SEQ ID NO: 4090 - RNA, 23 nt, Artificial Sequence
  source: /note="Description of Artificial Sequence: Synthetic oligonucleotide"
ugugccaucaguaucuuaaugaa

SEQ ID NO: 4091 - RNA, 23 nt, Artificial Sequence
  source: /note="Description of Artificial Sequence: Synthetic oligonucleotide"
gugccaucaguaucuuaaugaag

SEQ ID NO: 4092 - RNA, 23 nt, Artificial Sequence
  source: /note="Description of Artificial Sequence: Synthetic oligonucleotide"
ccuuagaacaccaaagauugucu

SEQ ID NO: 4093 - RNA, 23 nt, Artificial Sequence
  source: /note="Description of Artificial Sequence: Synthetic oligonucleotide"
auaucauuucacugucuaggcua

SEQ ID NO: 4094 - RNA, 23 nt, Artificial Sequence
  source: /note="Description of Artificial Sequence: Synthetic oligonucleotide"
uuucacugucuaggcuacaacag

SEQ ID NO: 4095 - RNA, 23 nt, Artificial Sequence
  source: /note="Description of Artificial Sequence: Synthetic oligonucleotide"
accaacuauccaaguguuauacc

SEQ ID NO: 4096 - RNA, 23 nt, Artificial Sequence
  source: /note="Description of Artificial Sequence: Synthetic oligonucleotide"
uuuugguuccaaguccaauaugg

SEQ ID NO: 4097 - RNA, 23 nt, Artificial Sequence
  source: /note="Description of Artificial Sequence: Synthetic oligonucleotide"
agugcuuaugaggugaucaaacu

SEQ ID NO: 4098 - RNA, 23 nt, Artificial Sequence
  source: /note="Description of Artificial Sequence: Synthetic oligonucleotide"
aaucucagaccuugugaagguga

SEQ ID NO: 4099 - RNA, 23 nt, Artificial Sequence
  source: /note="Description of Artificial Sequence: Synthetic oligonucleotide"
uguaaaauccacagcuauauccu

SEQ ID NO: 4100 - RNA, 23 nt, Artificial Sequence
  source: /note="Description of Artificial Sequence: Synthetic oligonucleotide"
cuccuucacugaacaugccuagu

SEQ ID NO: 4101 - RNA, 23 nt, Artificial Sequence
  source: /note="Description of Artificial Sequence: Synthetic oligonucleotide"
cugggauccaguguauaaaucca

SEQ ID NO: 4102 - RNA, 23 nt, Artificial Sequence
  source: /note="Description of Artificial Sequence: Synthetic oligonucleotide"
cccaauaaaccuugaacagugac

SEQ ID NO: 4103 - RNA, 23 nt, Artificial Sequence
  source: /note="Description of Artificial Sequence: Synthetic oligonucleotide"
auggccugugccaucaguaucuu

SEQ ID NO: 4104 - RNA, 23 nt, Artificial Sequence
  source: /note="Description of Artificial Sequence: Synthetic oligonucleotide"
ucuuguugaugucaucgaagaca

SEQ ID NO: 4105 - RNA, 23 nt, Artificial Sequence
  source: /note="Description of Artificial Sequence: Synthetic oligonucleotide"
gcagauuuggcagagaguauaau

SEQ ID NO: 4106 - RNA, 23 nt, Artificial Sequence
  source: /note="Description of Artificial Sequence: Synthetic oligonucleotide"
aguuuccaccaugauuaaggguc

SEQ ID NO: 4107 - RNA, 23 nt, Artificial Sequence
  source: /note="Description of Artificial Sequence: Synthetic oligonucleotide"
gucuaggcuacaacaggauucua

SEQ ID NO: 4108 - RNA, 23 nt, Artificial Sequence
  source: /note="Description of Artificial Sequence: Synthetic oligonucleotide"
gguggagguugugcauguugucc

SEQ ID NO: 4109 - RNA, 23 nt, Artificial Sequence
  source: /note="Description of Artificial Sequence: Synthetic oligonucleotide"
uggcuccuucacugaacaugccu

SEQ ID NO: 4110 - RNA, 23 nt, Artificial Sequence
  source: /note="Description of Artificial Sequence: Synthetic oligonucleotide"
uccuuuugguuccaaguccaaua

SEQ ID NO: 4111 - RNA, 23 nt, Artificial Sequence
  source: /note="Description of Artificial Sequence: Synthetic oligonucleotide"
uggccugugccaucaguaucuua

SEQ ID NO: 4112 - RNA, 23 nt, Artificial Sequence
  source: /note="Description of Artificial Sequence: Synthetic oligonucleotide"
gugcuuaugaggugaucaaacuc

SEQ ID NO: 4113 - RNA, 23 nt, Artificial Sequence
  source: /note="Description of Artificial Sequence: Synthetic oligonucleotide"
ugcuuaugaggugaucaaacuca

SEQ ID NO: 4114 - RNA, 23 nt, Artificial Sequence
  source: /note="Description of Artificial Sequence: Synthetic oligonucleotide"
uuccuugcauuuugggacagaau

SEQ ID NO: 4115 - RNA, 23 nt, Artificial Sequence
  source: /note="Description of Artificial Sequence: Synthetic oligonucleotide"
uugguuccaaguccaauauggca

SEQ ID NO: 4116 - RNA, 23 nt, Artificial Sequence
  source: /note="Description of Artificial Sequence: Synthetic oligonucleotide"
uucacugucuaggcuacaacagg

SEQ ID NO: 4117 - RNA, 23 nt, Artificial Sequence
  source: /note="Description of Artificial Sequence: Synthetic oligonucleotide"
ucacugucuaggcuacaacagga

SEQ ID NO: 4118 - RNA, 23 nt, Artificial Sequence
  source: /note="Description of Artificial Sequence: Synthetic oligonucleotide"
agaauaagauuacaguuguuggg

SEQ ID NO: 4119 - RNA, 23 nt, Artificial Sequence
  source: /note="Description of Artificial Sequence: Synthetic oligonucleotide"
ugguugagagugcuuaugaggug

SEQ ID NO: 4120 - RNA, 23 nt, Artificial Sequence
  source: /note="Description of Artificial Sequence: Synthetic oligonucleotide"
cugucuaggcuacaacaggauuc

SEQ ID NO: 4121 - RNA, 23 nt, Artificial Sequence
  source: /note="Description of Artificial Sequence: Synthetic oligonucleotide"
ugucuaggcuacaacaggauucu

SEQ ID NO: 4122 - RNA, 23 nt, Artificial Sequence
  source: /note="Description of Artificial Sequence: Synthetic oligonucleotide"
agguggagguugugcauguuguc

SEQ ID NO: 4123 - RNA, 23 nt, Artificial Sequence
  source: /note="Description of Artificial Sequence: Synthetic oligonucleotide"
uaugaggugaucaaacucaaagg

SEQ ID NO: 4124 - RNA, 23 nt, Artificial Sequence
  source: /note="Description of Artificial Sequence: Synthetic oligonucleotide"
aggugaucaaacucaaaggcuac

SEQ ID NO: 4125 - RNA, 23 nt, Artificial Sequence
  source: /note="Description of Artificial Sequence: Synthetic oligonucleotide"
ucugaggaagaggcccguuugaa

SEQ ID NO: 4126 - RNA, 23 nt, Artificial Sequence
  source: /note="Description of Artificial Sequence: Synthetic oligonucleotide"
ucacaagcaggugguugagagug

SEQ ID NO: 4127 - RNA, 23 nt, Artificial Sequence
  source: /note="Description of Artificial Sequence: Synthetic oligonucleotide"
agcagauuuggcagagaguauaa

SEQ ID NO: 4128 - RNA, 23 nt, Artificial Sequence
  source: /note="Description of Artificial Sequence: Synthetic oligonucleotide"
gagugcuuaugaggugaucaaac

SEQ ID NO: 4129 - RNA, 23 nt, Artificial Sequence
  source: /note="Description of Artificial Sequence: Synthetic oligonucleotide"
guagcagauuuggcagagaguau

SEQ ID NO: 4130 - RNA, 23 nt, Artificial Sequence
  source: /note="Description of Artificial Sequence: Synthetic oligonucleotide"
agauuuggcagagaguauaauga

SEQ ID NO: 4131 - RNA, 23 nt, Artificial Sequence
  source: /note="Description of Artificial Sequence: Synthetic oligonucleotide"
gauuuggcagagaguauaaugaa

SEQ ID NO: 4132 - RNA, 23 nt, Artificial Sequence
  source: /note="Description of Artificial Sequence: Synthetic oligonucleotide"
uccuugcauuuugggacagaaug

SEQ ID NO: 4133 - RNA, 23 nt, Artificial Sequence
  source: /note="Description of Artificial Sequence: Synthetic oligonucleotide"
gaauggaaucucagaccuuguga

SEQ ID NO: 4134 - RNA, 23 nt, Artificial Sequence
  source: /note="Description of Artificial Sequence: Synthetic oligonucleotide"
uccacagcuauauccugaugcug

SEQ ID NO: 4135 - RNA, 23 nt, Artificial Sequence
  source: /note="Description of Artificial Sequence: Synthetic oligonucleotide"
cugaggaagaggcccguuugaag

SEQ ID NO: 4136 - RNA, 23 nt, Artificial Sequence
  source: /note="Description of Artificial Sequence: Synthetic oligonucleotide"
cuucugaggaagaggcccguuug

SEQ ID NO: 4137 - RNA, 23 nt, Artificial Sequence
  source: /note="Description of Artificial Sequence: Synthetic oligonucleotide"
gucacauccugggauccagugua

SEQ ID NO: 4138 - RNA, 23 nt, Artificial Sequence
  source: /note="Description of Artificial Sequence: Synthetic oligonucleotide"
gcagccuuuuccuuagaacacca

SEQ ID NO: 4139 - RNA, 23 nt, Artificial Sequence
  source: /note="Description of Artificial Sequence: Synthetic oligonucleotide"
cuucaacugguuagugugaaaua

SEQ ID NO: 4140 - RNA, 21 nt, Artificial Sequence
  source: /note="Description of Artificial Sequence: Synthetic oligonucleotide"
gaaugugaaagucaucgacaa

SEQ ID NO: 4141 - RNA, 21 nt, Artificial Sequence
  source: /note="Description of Artificial Sequence: Synthetic oligonucleotide"
uuuucaauggguguccuagga

SEQ ID NO: 4142 - RNA, 21 nt, Artificial Sequence
  source: /note="Description of Artificial Sequence: Synthetic oligonucleotide"
gaaagucaucgacaagacauu

SEQ ID NO: 4143 - RNA, 21 nt, Artificial Sequence
  source: /note="Description of Artificial Sequence: Synthetic oligonucleotide"
ucaucgacaagacauugguga

SEQ ID NO: 4144 - RNA, 21 nt, Artificial Sequence
  source: /note="Description of Artificial Sequence: Synthetic oligonucleotide"
uuucaauggguguccuaggaa

SEQ ID NO: 4145 - RNA, 21 nt, Artificial Sequence
  source: /note="Description of Artificial Sequence: Synthetic oligonucleotide"
aauggguguccuaggaaccuu

SEQ ID NO: 4146 - RNA, 21 nt, Artificial Sequence
  source: /note="Description of Artificial Sequence: Synthetic oligonucleotide"
gacagugcacaauauuuucca

SEQ ID NO: 4147 - RNA, 21 nt, Artificial Sequence
  source: /note="Description of Artificial Sequence: Synthetic oligonucleotide"
acuuuucaauggguguccuaa

SEQ ID NO: 4148 - RNA, 21 nt, Artificial Sequence
  source: /note="Description of Artificial Sequence: Synthetic oligonucleotide"
aagucaucgacaagacauuga

SEQ ID NO: 4149 - RNA, 21 nt, Artificial Sequence
  source: /note="Description of Artificial Sequence: Synthetic oligonucleotide"
aucgacaagacauuggugaga

SEQ ID NO: 4150 - RNA, 21 nt, Artificial Sequence
  source: /note="Description of Artificial Sequence: Synthetic oligonucleotide"
gggagaaagguguucaagaua
